(19) United States
(12) Patent Application Publication
(10) Pub. No.: US 2025/0361538 A1
(43) Pub. Date: Nov. 27, 2025

(54) BACTERIUM, MICROBIAL CONSORTIUM COMPRISING THE SAME AND USES THEREOF

(71) Applicants: THE STATE OF ISRAEL, MINISTRY OF AGRICULTURE & RURAL DEVELOPMENT, AGRICULTURAL RESEARCH ORGANIZATION, Rishon Lezion (IL); ISRAEL OCEANOGRAPHIC & LIMNOLOGICAL RESEARCH LTD., Haifa (IL); B.G. NEGEV TECHNOLOGIES AND APPLICATIONS LTD., AT BEN-GURION UNIVERSITY, Beer Sheva (IL)

(72) Inventors: Lior GUTTMAN, Eilat (IL); Matan MASASA, Eilat (IL); Ariel KUSHMARO, Beer Yaakov (IL)

(73) Assignees: THE STATE OF ISRAEL, MINISTRY OF AGRICULTURE & RURAL DEVELOPMENT, AGRICULTURAL RESEARCH ORGANIZATION, Rishon Lezion (IL); ISRAEL OCEANOGRAPHIC & LIMNOLOGICAL RESEARCH LTD., Haifa (IL); B.G. NEGEV TECHNOLOGIES AND APPLICATIONS LTD., AT BEN-GURION UNIVERSITY, Beer Sheva (IL)

(21) Appl. No.: 18/846,839

(22) PCT Filed: Mar. 15, 2023
(86) PCT No.: PCT/IL2023/050274

§ 371 Date: Sep. 13, 2024

Related U.S. Application Data
(60) Provisional application No. 63/269,362, filed on Mar. 15, 2022.

(51) Int. Cl. C12P 19/04; C12N 9/28; C12P 19/14

(52) U.S. Cl. CPC C12P 19/04; C12N 9/2417; C12P 19/14; C12Y 302/01001

(57) ABSTRACT

The present disclosure provides marine-derived bacterium, consortium comprising the same and uses therefore for hydrolyzing carbohydrate.

### CROSS-REFERENCE TO RELATED APPLICATIONS

[0001] This application is a U.S. National Phase of International Patent Application No. PCT/IL2023/050274, filed on Mar. 15, 2023, which claims priority to U.S. Application No. 63/269,362, filed Mar. 15, 2022. The entire contents of these applications are incorporated herein by reference in their entirety.

### SEQUENCE LISTING

[0002] The instant application contains a Sequence Listing which has been submitted electronically in XML format is hereby incorporated by reference in its entirety. Said XML copy, created on Jul. 15, 2025, is named 269002_000023_Seq_Listing and is 4,478,711 bytes in size.

### TECHNOLOGICAL FIELD

[0003] The present invention relates to bacterium, microbial consortium comprising the same and uses thereof.

### BACKGROUND ART

[0004] References considered to be relevant as background to the presently disclosed subject matter are listed below:
[0005] Baghel, Ravi S., et al. “Biorefining of marine macroalgal biomass for production of biofuel and commodity chemicals.” Green Chemistry 17.4 (2015): 2436-2443.
[0006] Korzen, Leor, et al. “Marine integrated culture of carbohydrate rich Ulva rigida for enhanced production of bioethanol.” RSC Advances 5.73 (2015): 59251-59256.
[0007] Naidu, M. A., and P. Saranraj. “Bacterial amylase: a review.” Int J Pharm Biol Arch 4.2 (2013): 274-87.
[0008] Arahal, David R., and Antonio Ventosa. “Moderately halophilic and halotolerant species of Bacillus and related genera.” Applications and systematics of Bacillus and relatives (2002): 83-99.
[0009] Kumar, Sumit, et al. “Halophiles as a source of polyextremophilic α-amylase for industrial applications.” AIMS Microbiology 2.1 (2016): 1-26.
[0010] Park, Byung H., et al. “CAZymes Analysis Toolkit (CAT): web service for searching and analyzing carbohydrate-active enzymes in a newly sequenced organism using CAZy database.” Glycobiology 20.12 (2010): 1574-1584.
[0011] Trincone, Antonio. “Update on marine carbohydrate hydrolyzing enzymes: biotechnological applications.” Molecules 23.4 (2018): 901.
[0012] Trivedi, Nitin, et al. “An integrated process for the extraction of fuel and chemicals from marine macroalgal biomass.” Scientific reports 6.1 (2016): 1-8.

[0013] Acknowledgement of the above references herein is not to be inferred as meaning that these are in any way relevant to the patentability of the presently disclosed subject matter.

### BACKGROUND

[0014] Polysaccharides such as starch have various industrial applications as they can be hydrolyzed to monosaccharides by amylases and glucoamylases. These enzymes consist of many sub-families with diverse functional specifications as the optimal activation temperature or salinity, substrate characteristics, etc.

[0015] Seaweeds like Gracilaria conferta, Laminaria digitate and Ulva rigida were recognized for their potential as raw biomass for biorefinery for feeds, pharmaceutics and cosmetics, as well as for bioethanol production (Baghel, Ravi S., et al.). This is also due to the relatively high content of starch in the dry biomass of some of these species (e.g., Ulva rigida), up to 31.5% of the dry material (Korzen, Leor, et al.).

[0016] Among the starch degrading bacteria, several species of the genus Bacillus have been recommended for the purification of thermostable α-amylases (Arahal, David R).

### GENERAL DESCRIPTION

[0017] The present disclosure revealed a new halophilic, halotolerant, heterotrophic bacterial strain of Alkalihalobacillus sp., that consist various carbohydrate-active enzymes (CAZymes) in its genome including those of α-amylases that enables the bacterium to degraded starch through a potential complete metabolism of this polysaccharide into D-glucose monosaccharide and its active nucleotide form of UDP-glucose. Genomic analyses based on 16S rRNA gene and the whole genome content suggest this bacterium, from the gut of a sea urchin, as a novel bacterium of the genus Alkalihalobacillus.

[0018] The present disclosure provides in accordance with some aspects, a marine-derived halotolerant bacterium comprising various CAZymes in its genome.

[0019] The present disclosure provides in accordance with some aspects, a marine-derived halotolerant bacterium produces various CAZymes.

[0020] The present disclosure provides in accordance with some other aspects, a marine-derived halotolerant bacterium being capable of hydrolyzing at least one carbohydrate.

[0021] The present disclosure provides in accordance with some other aspects, a microbial consortium comprising at least one marine-derived halotolerant bacterium or any isolate, mutant, spores, enzymes or extracts thereof and/or a conditioned culture medium of the at least one bacterium and/or secreted compounds from the at least one bacterium, wherein the at least one marine-derived halotolerant bacterium comprises various CAZymes in its genome.

[0022] The present disclosure provides in accordance with some other aspects, a microbial consortium comprising at least one marine-derived halotolerant bacterium or any isolate, mutant, spores, enzymes or extracts thereof and/or a conditioned culture medium of the at least one bacterium and/or secreted compounds from the at least one bacterium, wherein the at least one marine-derived halotolerant bacterium produces various CAZymes.

[0023] The present disclosure provides in accordance with some other aspects, a microbial consortium comprising at least one marine-derived halotolerant bacterium or any isolate, mutant, spores, enzymes or extracts thereof and/or a conditioned culture medium of the at least one bacterium and/or secreted compounds from the at least one bacterium, wherein said at least one bacterium is capable of hydrolyzing at least one carbohydrate.

[0024] The present disclosure provides in accordance with some further aspects, a bacterial culture comprising a biomass composition and a bacterium or a microbial consortium, the microbial consortium comprising the at least one marine-derived halotolerant bacterium or any isolate, mutant, spores, enzymes or extracts thereof and/or a conditioned culture medium of the at least one bacterium and/or secreted compounds from the at least one bacterium, wherein the bacterium is characterized by at least one of (i) comprises various CAZymes in its genome, (ii) produces various CAZymes, (iii) capable of hydrolyzing at least one carbohydrate.

[0025] The present disclosure provides in accordance with yet some aspects, a method of hydrolyzing carbohydrate, the method comprising contacting a biomass, biomass derivatives or compositions comprising biomass or any derivative thereof with a bacterium or a microbial consortium, wherein the microbial consortium comprising the at least one marine-derived halotolerant bacterium or any isolate, mutant, spores, enzymes or extracts thereof and/or a conditioned culture medium of the at least one bacterium and/or secreted compounds from the at least one bacterium, wherein the bacterium is characterized by at least one of (i) comprises various CAZymes in its genome, (ii) produces various CAZymes, (iii) capable of hydrolyzing at least one carbohydrate.

[0026] The present disclosure provides in accordance with yet some aspects, a method of production of bioenergy products or metabolites comprising contacting a biomass or biomass derivatives with a bacterium or a microbial consortium, wherein the microbial consortium comprising the at least one marine-derived halotolerant bacterium or any isolate, mutant, spores, enzymes or extracts thereof and/or a conditioned culture medium of the at least one bacterium and/or secreted compounds from the at least one bacterium, wherein the bacterium is characterized by at least one of (i) comprises various CAZymes in its genome, (ii) produces various CAZymes, (iii) capable of hydrolyzing at least one carbohydrate.

[0027] The present disclosure provides in accordance with yet other aspects, a method of identification or isolating at least one bacterium, the method comprising: (a) subjecting a sample comprising uncharacterized bacteria to a high salinity condition and/or high temperature conditions to obtain a treated sample; and b) selecting at least one bacterium from the treated sample, wherein the selected bacterium is capable of hydrolyzing at least carbohydrate.

### EMBODIMENTS

[0028] Some embodiments of this disclosure will now be described in the following numbered paragraph. The following description intends to add on the above general description and not limit it in any manner.

1. A marine-derived halotolerant bacterium characterized by at least one of (i) comprises various CAZymes in its genome, (ii) produces various CAZymes, (iii) capable of hydrolyzing at least one carbohydrate.
2. A microbial consortium comprising at least one marine-derived halotolerant bacterium or any isolate, mutant, spores, enzymes or extracts thereof and/or a conditioned culture medium of the at least one bacterium and/or secreted compounds from the at least one bacterium, wherein said at least one bacterium is of Embodiment No. 1.
3. The bacterium of Embodiment No. 1 or the microbial consortium of Embodiment No. 2, wherein said bacterium is present at a low abundance in intestine of a marine urchin.
4. The bacterium or the microbial consortium of Embodiment No. 3, wherein said bacterium is present in Tripneustes gratilla elatensis.
5. The bacterium or the microbial consortium of any one of Embodiments No. 1 to 4, wherein said bacterium is capable of growing in a solution comprising about 3% saline.
6. The bacterium or the microbial consortium of any one of Embodiments No. 1 to 4, wherein said bacterium is capable of growing at 30° C.
7. The bacterium or the microbial consortium of any one of Embodiments No. 1 to 4, wherein said bacterium is capable of growing at 30° C. in a solution comprising about 3% saline.
8. The bacterium or the microbial consortium of any one of Embodiments No. 1 to 7, wherein the carbohydrate is a polysaccharide.
9. The bacterium or the microbial consortium of Embodiment No. 8, wherein said polysaccharide is at least one of (i) cellulose, (ii) starch, (iii) glycogen or (iv) any combination thereof.
10. The bacterium or the microbial consortium of any one of Embodiment Nos. 1 to 7, wherein said carbohydrate is at least one of amylose and amylopectin.
11. The bacterium or the microbial consortium of any one of Embodiment Nos. 1 to 7, wherein said carbohydrate is from an algal source.
12. The bacterium or the microbial consortium of any one of Embodiment Nos. 1 to 7, wherein said carbohydrate is an algal polysaccharide.
13. The bacterium or the microbial consortium of any one of Embodiment Nos. 1 to 7, wherein said carbohydrate is an algal extract.
14. The bacterium or the microbial consortium of any one of Embodiment Nos. 1 to 7, wherein said carbohydrate is an algal biomass.
15. The bacterium or the microbial consortium of any one of Embodiment Nos. 1 to 7, wherein said carbohydrate is one or more of carrageenan, agar, cellulose, alginate, laminarin, fucoidan, ulvan, chitin, starch, xylan, rhamnan sulfate, chrysolaminarin, or any combination thereof.
16. The bacterium or the microbial consortium of any one of Embodiment Nos. 1 to 15, wherein said bacterium expresses genes capable of metabolizing (i) amino acid and derivatives, (ii) carbohydrate, (iii) protein metabolism or (iv) a combination thereof.
17. The bacterium or the microbial consortium of any one of Embodiment Nos. 1 to 15, wherein said bacterium express gene copies of at least one carbohydrate active enzyme (CAZome).
18. The bacterium or the microbial consortium of Embodiment No. 17, wherein said bacterium comprises at least 80 gene copies, optionally at least 90 gene copies of CAZymes.
19. The bacterium or the microbial consortium of any one of Embodiment Nos. 1 to 15, wherein said bacterium contain at least one carbohydrate active enzyme (CAZome).
20. The bacterium or the microbial consortium of any one of Embodiment Nos. 1 to 15, wherein said bacterium produces at least one carbohydrate active enzyme (CAZome).
21. The bacterium or the microbial consortium of any one of Embodiment Nos. 17 to 20, wherein said CAZome comprise at least one glycoside hydrolase (GH) enzyme, at least one glycosyltransferase (GT) enzyme, at least one polysaccharide lyases (PLs) enzyme, at least one carbohydrate esterases (CEs) enzyme, at least one carbohydrate-binding modules (CBM) enzyme, at least one auxiliary activities (AAs) enzyme or any combination thereof.
22. The bacterium or the microbial consortium of Embodiment No. 21, wherein the at least one bacterium contains gene copies of at least one CE enzyme.
23. The bacterium or the microbial consortium of Embodiment No. 21, wherein the at least one bacterium contains gene copies of at least one CBM enzyme.
24. The bacterium or the microbial consortium of Embodiment No. 21, wherein the at least one bacterium contains gene copies of at least one AA enzyme.
25. The bacterium or the microbial consortium of Embodiment No. 21, wherein the at least one bacterium contains gene copies of at least one PL enzyme.
26. The bacterium or the microbial consortium of Embodiment No. 21, wherein the at least one bacterium contains gene copies of at least one GT enzyme.
27. The bacterium or the microbial consortium of Embodiment No. 26, wherein the at least one GT enzyme is at least one of (i) GT4, (ii) GT2, (iii) a combination thereof.
28. The bacterium or the microbial consortium of Embodiment No. 27, wherein said bacterium contain at least 12 GT4 gene copies, optionally at least 15 GT4 gene copies.
29. The bacterium or the microbial consortium of Embodiment No. 27, wherein said bacterium contain at least 5 GT2 gene copies, optionally at least 8 GT2 gene copies.
30. The bacterium or the microbial consortium of Embodiment No. 21, wherein the at least one bacterium contains gene copies of at least one GH enzyme.
31. The bacterium or the microbial consortium of Embodiment No. 30, wherein said GH enzyme is GH4.
32. The bacterium or the microbial consortium of Embodiment No. 30, wherein said GH enzyme is at least one of (i) GH13, (ii) GH32, (iii) GH31, (iv) GH16 or (v) a combination thereof.
33. The bacterium or the microbial consortium of Embodiment No. 32, wherein said bacterium contain at least 6 GH13 gene copies, optionally at least 8 GH3 gene copies.
34. The bacterium or the microbial consortium of Embodiment No. 33, wherein the GH13 is at least one of GH13_31, GH13_29, GH13_18, GH13_14, GH13_5 or a combination thereof.
35. The bacterium or the microbial consortium of Embodiment No. 32, wherein said bacterium contain at least 6 GH32 gene copies, optionally at least 8 GH32 gene copies.
36. The bacterium or the microbial consortium of any one of Embodiment Nos. 1 to 35, wherein said bacterium contain at least one enzyme listed in Table 3.
37. The bacterium or the microbial consortium of any one of Embodiment Nos. 1 to 36, wherein said bacterium is capable of hydrolyzing a carbohydrate into at least one of (i) amino sugars and nucleotide sugars, (ii) D-glucose, (iii) D-glucose-6P or (iv) combination thereof.
38. The bacterium or the microbial consortium of any one of Embodiment Nos. 1 to 37, wherein said bacterium has at least 85% identity with SEQ ID NO:1.
39. The bacterium or the microbial consortium of any one of Embodiment Nos. 1 to 38, wherein said bacterium is from the genus Alkalihalobacillus.
40. The bacterium or the microbial consortium of any one of Embodiment Nos. 1 to 39, wherein said bacterium has at least 85% identity with SEQ ID NO:2.
41. The bacterium or the microbial consortium of any one of Embodiment Nos. 1 to 40, wherein said bacterium has a sequence as provided in SEQ ID NO:2.
42. A bacterial culture comprising a biomass composition and a bacterium or a microbial consortium of any one of Embodiment Nos. 1 to 41.
43. The bacterial culture of Embodiment No. 42, wherein said biomass is an algal biomass.
44. A method of hydrolyzing carbohydrate, the method comprising contacting a biomass, biomass derivatives or compositions comprising biomass or any derivative thereof with a bacterium or a microbial consortium of any one of Embodiment Nos. 1 to 41 with a biomass.
45. The method of Embodiment No. 44, wherein said biomass is an algal biomass or any extract thereof.
46. A method of production of bioenergy products or metabolites comprising contacting a biomass or biomass derivatives with the bacterium or the microbial consortium of Embodiment Nos. 1 to 41.
47. The method according to Embodiment No. 46, wherein the biomass is an organic matter.
48. The method of Embodiment No. 47, wherein said biomass is an algal biomass.
49. A method of identification or isolating at least one bacterium, the method comprising: (a) subjecting a sample comprising uncharacterized bacteria to a high salinity condition and/or high temperature conditions to obtain a treated sample; and b) selecting at least one bacterium from the treated sample, wherein said selected bacterium is capable of hydrolyzing at least carbohydrate.
50. The method of Embodiment No. 49, wherein the sample comprises tissue samples from intestine of a marine urchin.

### BRIEF DESCRIPTION OF THE DRAWINGS

[0029] In order to better understand the subject matter that is disclosed herein and to exemplify how it may be carried out in practice, embodiments will now be described, by way of non-limiting example only, with reference to the accompanying drawings, in which:

[0030] FIGS. 1A-1F is a graphical overview of an exemplary workflow including the following steps: FIG. 1A feeding sea urchins with a mono-specific algal diet of Ulva fasciata for 8 weeks; FIG. 1B harvesting the whole digestive tract of the animals; FIG. 1C enrichment of the heterotrophic bacterial community in the crude gut samples through incubation in marine broth media; FIG. 1D isolation of bacterial colonies on agar plates with marine broth media; FIG. 1E and FIG. 1F polysaccharide lyases (polylyases) activity assay on isolated bacterial colonies performed in agar plates with mineral salts media and Ulva-polysaccharides extract and in agar control, respectively.

[0031] FIG. 2 shows Alkalihalobacillus sp. 16S rDNA sequences genomic repeats alignment.

[0032] FIG. 3 is a circular map of the genome of Alkalihalobacillus sp. generated using CGView Comparison Tool, circles (from outside) representing the following: 1. sequence features; 2. GC content; and 3. GC skew, the different colors identify genome content as CDSs (blue); tRNAs (black); rRNAs (red); tmRNAs (pink); and GC Sqews+(green) or −(purple).

[0033] FIG. 4 is an evolutionary tree based on comparative analysis of the 16s rRNA gene sequence of the isolated bacterium Alkohalobacillus sp. and phylogenetically close relative bacteria in the database, the evolutionary distances were computed using the Maximum Composite Likelihood method, tree was generated using the MEGA X tool according to Neighbor-Joining method, and bootstrap test was performed in 1000 replicates while the provided number next to each branch of the tree identify the percentage of replicate trees in which the associated taxa were clustered together in the bootstrap test.

[0034] FIGS. 5A-5D are graphs showing the optimum salinity and temperature for amylase activity; FIG. 5A shows in vitro Alkalihalobacillus sp. growth in different salinities of 0, 1, 2, 3, and 4% (w/v) at 30° C., FIG. 5B shows extracellular α-amylase enzymatic activity of the isolated Alkalihalobacillus sp. along 96 hours in different salinities of 0, 1, 2, 3, and 4% (w/v) at 30° C., FIG. 5C shows in vitro Alkalihalobacillus sp. growth in different temperature of (25° C., 30° C., 37° C.) in salinity of 3% and FIG. 5D shows extracellular α-amylase enzymatic activity of the isolated Alkalihalobacillus sp. in different temperature of (25° C., 30° C., 37° C.) in salinity of 3%; values are mean±SD, n=3, One unit (U) of α-amylase activity is equal to disappearance of 1 mg/min of the iodine binding starch in the assay reaction.

[0035] FIGS. 6A-6C show genome analysis of Alkalihalobacillus sp., FIG. 6A is a column bar presents the coverage of gene analysis with the percent of genes that were either clustered (green) or not clustered (blue) into known subsystem categories, FIG. 6B is a pie chart of the functional categories (as subsystems) in the genome of Alkalihalobacillus sp. as analyzed in RAST, colors indicates the subsystem category as in index shown as FIG. 6C, while the number of annotated genes in each category is also indicated in brackets.

[0036] FIG. 7 is a pie chart of the content of functional categories in the genome of isolated bacterium Alkalihalobacillus sp., genes were annotated and categorized into Cluster of Orthologous Groups (COG) while the number of orthologue genes in each category is displayed.

[0037] FIG. 8 is a Venn diagram presents the results on the annotated genes of Alkalihalobacillus sp. using the three different tools of HMMER (green), DIAMOND (brownish), or Hotpep (pink), only genes that received a similar annotation in at least two of the three tools were considered as ‘truly annotated’.

[0038] FIGS. 9A and 9B are comparative heatmap diagram of the content of CAZymes from the genomes of the isolated bacterium Alkalihalobacillus sp. and other bacteria with an available complete genome in the database the map highlights the present and the cumulative number of copies in the genome (dark blue=0 to dark red=5 or above) of CAZymes of different families, comparison of the isolated bacterium was made against several species of Bacillus which are currently used for α-amylases production in various industries as well as against halophilic bacteria that contain hydrolases or polylyases in their genome, bacterial species which were reported for their capability of starch hydrolysis in in vitro experiments are marked in *, similarity analysis based on the content and number of copies of the CAZymes in the different bacteria was performed and demonstrated by a similarity tree on the left side of the map.

[0039] FIG. 10 is a comparative heatmap diagram of the content of CAZymes from the family GH13 in the genomes of the isolated bacterium Alkalihalobacillus sp. and other bacteria with an available complete genome in the database, the map highlights the present and the cumulative number of copies in the genome (dark blue=0 to dark red=5 or above) of GH13 CAZymes of different sub-families, comparison of the isolated bacterium was made against several species of Bacillus which are currently used for α-amylases production in various industries as well as against halophilic bacteria that contain hydrolases or polylyases in their genome, bacterial species which were not verified for their capability of starch hydrolysis in vitro are marked in*, similarity analysis based on the content and number of copies of the GH13 CAZymes in the different bacteria

[0040] FIG. 11 is a metabolic mapping performed according to the Kyoto Encyclopedia of Genes and Genomes (KEGG) showing a hypothetical pathway for the metabolism of starch by the isolated bacterium Alkalihalubacillus sp. green boxes present the genes (CAZymes) which have been identified in the genome of the isolated bacterium while the clear boxes present other known genes in the referred pathway between each two given compounds (marked in ∘), arrows present the direction of the metabolic function, the highlighted red lines identify pathways for complete metabolism of starch as suggested by the KEGG mapper.

### DETAILED DESCRIPTION OF EMBODIMENTS

[0041] The present disclosure is based on the identification of novel bacterium that was isolated from a marine source, specifically from the gut of the collector sea urchin Tripneustes gratilla elatensis.

[0042] As shown herein, the bacterium was tolerant to high saline concentration and high temperatures. Specifically, as shown in the Examples, in vitro studies of α-amylase activity at various salinities (0-4%) and temperatures (25-37° C.) showed that the isolated bacterium was tolerant to saline concentration of even up to 4% and to high temperature of even up to 37° C.

[0043] Based on genomic analyses of both the whole-genome content of this bacterium and its 16S rRNA gene suggested that the identified isolated bacterium is a new strain of the genus Alkalihalobacillus , referred to here as Alkalihalobacillus sp.

[0044] As further shown herein, genomic analysis indicated that the bacterium genome contains a diverse pool of genes for carbohydrate-active enzymes including, inter alia, those of α-amylases, that enabled this bacterium to degrade starch in in vitro assays into monosaccharides of D-glucose 6-phosphate (6P), D-glucose, and its active nucleotide form of UDP-glucose.

[0045] Based on the above, it was suggested that the isolated bacteria can be used for decomposition of organic matter such as polysaccharides. Moreover, it was suggested that the marine isolated bacteria and/or enzymes from the marine isolated bacteria can be used in a salt-tolerance mechanism and/or in decomposing seaweed polysaccharides.

[0046] Hence, in accordance with some aspects, the present disclosure provides a marine-derived halotolerant bacterium, wherein said at least one bacterium is characterized by at least one of (i) comprises various CAZymes in its genome, (ii) produces various CAZymes, (iii) capable of hydrolyzing at least one carbohydrate.

[0047] The bacterium can be part of a consortium. Hence, in accordance with some aspects, the present disclosure provides a microbial consortium comprising at least one marine-derived halotolerant bacterium or any isolate, mutant, spores, enzymes or extracts thereof and/or a conditioned culture medium of the at least one bacterium and/or secreted compounds from the at least one bacterium, wherein said at least one bacterium comprises various CAZymes in its genome.

[0048] In accordance with some aspects, the present disclosure provides a microbial consortium comprising at least one marine-derived halotolerant bacterium or any isolate, mutant, spores, enzymes or extracts thereof and/or a conditioned culture medium of the at least one bacterium and/or secreted compounds from the at least one bacterium, wherein said at least one bacterium produces various CAZymes.

[0049] In accordance with some aspects, the present disclosure provides a microbial consortium comprising at least one marine-derived halotolerant bacterium or any isolate, mutant, spores, enzymes or extracts thereof and/or a conditioned culture medium of the at least one bacterium and/or secreted compounds from the at least one bacterium, wherein said at least one bacterium is capable of hydrolyzing at least one carbohydrate.

[0050] In the following disclosure, when referring to microbial consortium it is to be understood as referring to bacterium, compositions and methods. Thus, whenever providing a feature with reference to the microbial consortium, it is to be understood as defining the same feature with respect to the bacterium, compositions and methods, mutatis mutandis.

[0051] The microbial consortium as used herein refers to a mixture/cocktail including at least one of a bacterium, an archaeon, a protozoa, an algae, a fungi or a combination thereof. When referring to at least one bacterium it should be understood as referring to one bacterium species and/or strain as classified under common scientific classification.

[0052] In some embodiments, the microbial consortium comprises one or more bacterium provided that at least one bacterium is marine-derived halotolerant bacterium and is capable of hydrolyzing at least one carbohydrate.

[0053] In some embodiments, the bacterium being the subject of the present disclosure was identified from the gut (intestine) of a marine sea urchin and thus can be isolated and/or purified, by any known method in the art as also detailed below.

[0054] In some examples, the bacterium is present at a low abundance in intestine of a marine urchin. In some other examples, the bacterium is present in Tripneustes gratilla elatensis.

[0055] Abundance in the context of the present disclosure refers to a representation of the relative amount (quantity) of a specific bacterium in the intestine of a marine urchin. This amount can be obtained, by any method known in the art. For example, various molecular-based methods are available to characterize and quantitate the intestine of a marine urchin such as traditional clone libraries; direct sequencing using next-generation parallel sequencing technology; denaturing gradient gel electrophoresis and temperature gradient gel electrophoresis; terminal restriction fragment length polymorphism analysis; fluorescent in situ hybridization; and quantitative Polymerase Chain Reaction (PCR). In addition, computational analysis of sequence data including information on isolated bacteria from the intestine of a marine urchin can be used, for example by counting the number of mapped reads to a reference genome. Using computational tools, relative abundance for each microorganism in the microbiome can be determined and is defined as the number of reads mapped to a reference genome divided by the total number of microbial reads within a given microbiome sample and normalized in methods known in the art (e.g. genome size).

[0056] The term low-abundance as used herein refer to a bacterium that is present in the intestine of a marine urchin that is below a predetermined standard value/s or cutoff value/s. In some embodiments, low abundance bacterium has an average relative abundance of less than 0.5%, at times less than 0.4%, at times less than 0.3%, at times less than 0.2%, at times even less than 0.1%. In some embodiments, low abundance bacterium has an average relative abundance of between about 0.00001% to about 0.5%, at times between about 0.0001% to about 0.4%, at times between about 0.001% to about 0.3%, at times between about 0.01% to about 0.2%, at times between about 0.01% to about 0.1% at times between about 0.05% to about 0.1%.

[0057] The term bacterium used herein refers in accordance with some embodiments, to at least one of an isolated bacterium, a purified bacterium or a recombinant bacterium.

[0058] As described herein, the microbial consortium comprises at least one marine-derived bacterium that was shown to tolerate high salinity. Specifically, as shown in Example 2, the in vitro experiments confirmed that the isolated bacterium was capable to grow under salinity of at least 1%, for example, between 1 and 4%, and temperature of at least 25° C., for example between 25 and 37° C.

[0059] In some embodiments, the at least one marine-derived bacterium is a halotolerant bacterium.

[0060] As used herein, the term halotolerant bacterium refers to a bacterium that can tolerate high-salt conditions suggesting that this bacterium can grow in a wide ranges of salt concentrations.

[0061] In some embodiments, the at least one marine-derived bacterium is a halophilic bacterium.

[0062] As used herein, the term halophilic bacterium refers to a bacterium that requires high salt for growth.

[0063] In some examples, the bacterium is capable of growing in at least about 1% saline, at times at least about 2%, at times at least about 3%, at times at least about 4% saline.

[0064] In some examples, the bacterium is capable of growing in between about 1% saline and about 4% saline.

[0065] In some examples, the bacterium is capable of growing in about 1% saline, about 2%, about 3%, at times at about 4%.

[0066] In some examples, the bacterium is capable of growing for about 6 hours in 1% salinity, at times for about 12 hours, at times for about 18 hours, at times for about 24 hours, at times for about 36 hours, at times for about 48 hours, at times for about 60 hours, at times for about 72 hours, at times for about 84 hours, at times for about 96 hours in 1% salinity.

[0067] In some examples, the bacterium is capable of growing for about 6 hours in 2% salinity, at times for about 12 hours, at times for about 18 hours, at times for about 24 hours, at times for about 36 hours, at times for about 48 hours, at times for about 60 hours, at times for about 72 hours, at times for about 84 hours, at times for about 96 hours in 2% salinity.

[0068] In some examples, the bacterium is capable of growing for about 6 hours in 3% salinity, at times for about 12 hours, at times for about 18 hours, at times for about 24 hours, at times for about 36 hours, at times for about 48 hours, at times for about 60 hours, at times for about 72 hours, at times for about 84 hours, at times for about 96 hours in 3% salinity.

[0069] In some examples, the bacterium is capable of growing for about 6 hours in 4% salinity, at times for about 12 hours, at times for about 18 hours, at times for about 24 hours, at times for about 36 hours, at times for about 48 hours, at times for about 60 hours, at times for about 72 hours, at times for about 84 hours, at times for about 96 hours in 4% salinity.

[0070] In some examples, the bacterium is capable of growing at a temperature of 25° C., at times about 30° C., at times about 37° C.

[0071] In some examples, the at least bacterium is capable of growing in at least about 1% saline and/or at a temperature of at least about 25° C.

[0072] In some examples, the at least bacterium is capable of growing in at least about 2% saline and/or at a temperature of at least about 25° C.

[0073] In some examples, the at least bacterium is capable of growing in about 1% saline, at time about 2% saline, at time about 3% saline, at time about 4% saline at a temperature of about 25° C.

[0074] In some examples, the at least bacterium is capable of growing in about 1% saline, at time about 2% saline, at time about 3% saline, at time about 4% saline at a temperature of about 30° C.

[0075] In some examples, the at least bacterium is capable of growing in about 1% saline, at time about 2% saline, at time about 3% saline, at time about 4% saline at a temperature of about 37° C.

[0076] In some examples, the at least bacterium is capable of growing in about 1% saline, at a temperature of about 25° C., at times about 30° C., at times about 37° C.

[0077] In some examples, the at least bacterium is capable of growing in about 2% saline, at a temperature of about 25° C., at times about 30° C., at times about 37° C.

[0078] In some examples, the at least bacterium is capable of growing in about 3% saline, at a temperature of about 25° C., at times about 30° C., at times about 37° C.

[0079] In some examples, the at least bacterium is capable of growing in about 4% saline, at a temperature of about 25° C., at times about 30° C., at times about 37° C.

[0080] In some examples, the at least bacterium is capable of growing at salinities of between about 1% and about 4% and temperatures of between about 25° C. and about 37° C.

[0081] In some embodiments, the at least bacterium was capable of growing for at least 96 hours in a solution comprising at least about 1% saline, at least about 2% salinity, at least about 3% salinity, at least about 4% salinity. In some embodiments, the at least bacterium was capable of growing for at least 24 hours, at least 48 hours, at least 72 hours in a solution comprising at least about 1% saline, at least about 2% salinity, at least about 3% salinity, at least about 4% salinity.

[0082] In some embodiments, the at least bacterium was capable of growing for at least 96 hours in a solution comprising at least about 25° C., at least about 30° C., at least about 37° C. In some embodiments, the at least bacterium was capable of growing for at least 24 hours, at least 48 hours, at least 72 hours in at least about 25° C., at least about 30° C., at least about 37° C.

[0083] It should be noted that bacterium growth can be measured by any method known in the art, for example, the in vitro growth measurements described in the Examples below.

[0084] As described herein, the bacterium was capable of hydrolyzing carbohydrate. The term carbohydrate as used herein refers to is a biomolecule consisting of carbon (C), hydrogen (H) and oxygen (O) atoms. The term hydrolyzing as used herein refers to breakdown of the carbohydrates into monomeric sugars.

[0085] The present disclosure is not limited to a specific carbohydrate and as described herein may be applicable for a variety of carbohydrates.

[0086] In some embodiments, the carbohydrate is a polysaccharide.

[0087] In some examples, the at least one bacterium is capable of hydrolyzing at least one polysaccharide.

[0088] In some embodiments, the polysaccharide is at least one of (i) cellulose, (ii) starch, (iii) glycogen or (iv) any combination thereof.

[0089] In some examples, the at least one bacterium is capable of hydrolyzing starch.

[0090] As shown in Example 2 below, in vitro assays showed that the isolated bacterium is capable of producing α-amylases as shown in the α-amylase activity. Interestingly, α-amylase activity was observed at salinities of between 1 and 4% and temperatures of between 25° C. and 37° C.

[0091] In some embodiments, the at least bacterium was capable of maintaining amylases activity for at least 96 hours in a solution comprising at least about 1% saline, at least about 2% salinity, at least about 3% salinity, at least about 4% salinity. In some embodiments, the at least bacterium was capable of maintaining amylases activity for at least 24 hours, at least 48 hours, at least 72 hours in a solution comprising at least about 1% saline, at least about 2% salinity, at least about 3% salinity, at least about 4% salinity.

[0092] In some embodiments, the at least bacterium was capable of maintaining amylases activity for at least 96 hours in a solution comprising at least about 25° C., at least about 30° C., at least about 37° C. In some embodiments, the at least bacterium was capable of maintaining amylases activity for at least 24 hours, at least 48 hours, at least 72 hours in at least about 25° C., at least about 30° C., at least about 37° C.

[0093] The amylases activity can be measured by any method known in the art. For example, the amylase activity was determined using the starch-iodine assay Described herein in the examples below.

[0094] In some embodiments, the starch is at least one of amylose and amylopectin.

[0095] In some examples, the at least one bacterium is capable of hydrolyzing amylose.

[0096] In some examples, the at least one bacterium is capable of hydrolyzing amylopectin.

[0097] The carbohydrate, optionally being a polysaccharide may be from an algal source.

[0098] In some embodiments, the carbohydrate is a seaweed carbohydrate.

[0099] In some embodiments, the carbohydrate is an algal carbohydrate.

[0100] In some embodiments, the carbohydrate is a seaweed polysaccharide.

[0101] In some embodiments, the carbohydrate is an algal polysaccharide.

[0102] In some examples, the at least one bacterium is capable of hydrolyzing an algal carbohydrate.

[0103] In some examples, the at least one bacterium is capable of hydrolyzing an algal polysaccharide.

[0104] The algal polysaccharide refers to at least one polysaccharide derived from a seaweed source, specifically an algal source and can be in the form of an algae extract or algal biomass.

[0105] In some examples, the at least one bacterium is capable of hydrolyzing algae extract.

[0106] In some examples, the at least one bacterium is capable of hydrolyzing algae biomass.

[0107] In some embodiments, the at least one algal polysaccharide is one or more of carrageenan, agar, cellulose, alginate, laminarin, fucoidan, ulvan, chitin, starch, xylan, rhamnan sulfate, chrysolaminarin, or any combination thereof.

[0108] In some examples, the at least one bacterium is capable of hydrolyzing at least one of carrageenan, agar, alginate, laminarin, fucoidan, ulvan, chitin, starch, xylan, rhamnan sulfate, chrysolaminarin or any combination thereof.

[0109] In some embodiments, the at least one polysaccharide is at least one of carrageenan, agar, laminarin, ulvan or any combination thereof.

[0110] In some examples, the at least one bacterium is capable of hydrolyzing at least one of carrageenan, agar, laminarin, ulvan or any combination thereof.

[0111] In some embodiments, the at least one polysaccharide is at least one of carrageenan, laminarin, ulvan or any combination thereof.

[0112] In some examples, the at least one bacterium is capable of hydrolyzing at least one of arrageenan, laminarin, ulvan or any combination thereof.

[0113] In some embodiments, the at least one polysaccharide is at least one of carrageenan, agar, alginate or any combination thereof.

[0114] In some examples, the at least one bacterium is capable of hydrolyzing at least one of carrageenan, agar, alginate or any combination thereof.

[0115] In some embodiments, the at least one carbohydrate is carrageenan.

[0116] In some embodiments, the at least one carbohydrate is agar.

[0117] In some embodiments, the at least one carbohydrate is cellulose.

[0118] In some embodiments, the at least one carbohydrate is alginate.

[0119] In some embodiments, the at least one carbohydrate is laminarin.

[0120] In some embodiments, the at least one carbohydrate is fucoidan.

[0121] In some embodiments, the at least one carbohydrate is ulvan.

[0122] In some embodiments, the at least one carbohydrate is starch.

[0123] In some embodiments, the at least one carbohydrate is chitin.

[0124] In some embodiments, the at least one carbohydrate is xylan.

[0125] In some embodiments, the at least one carbohydrate is rhamnan sulfate.

[0126] In some embodiments, the at least one carbohydrate is chrysolaminarin.

[0127] As shown in Example 3, analysis of the whole-genome sequence of the at least one bacterium identified functional genes clustered into 25 subsystem categories, including amino acids and derivatives (372 genes), carbohydrates (274), and protein metabolism (236).

[0128] In some embodiments, the at least one bacterium expresses genes capable of metabolizing (i) amino acid and derivatives, (ii) carbohydrate, (iii) protein metabolism or (iv) a combination thereof.

[0129] As shown in Example 4, the content of carbohydrate-active enzymes (CAZymes) in the genome also referred as the bacterial CAZome showed that the at least one bacterium contained a pool of CAZymes.

[0130] In some embodiments, the at least one bacterium contain at least one carbohydrate active enzyme (CAZome).

[0131] In some examples, the at least one bacterium produces at least one CAZome.

[0132] Carbohydrate active enzymes are typically identified in CAZy that is a database of Carbohydrate-Active enZYmes (CAZymes).

[0133] In some examples, the at least one bacterium comprises at least 20 gene copies, at times at least 30 gene copies, at times at least 40 gene copies, at times at least 50 gene copies, at times at least 60 gene copies, at times at least 70 gene copies, at times at least 80 gene copies, at times at least 90 gene copies of CAZymes.

[0134] In some examples, the at least one bacterium comprises 20 gene copies, at times 30 gene copies, at times 40 gene copies, at times 50 gene copies, at times 60 gene copies, at times 70 gene copies, at times 80 gene copies, at times 90 gene copies of CAZymes.

[0135] In some examples, the at least one bacterium comprises 94 gene copies of CAZymes.

[0136] In some embodiments, the CAZome comprise at least one glycoside hydrolase (GH) enzyme, at least one glycosyltransferase (GT) enzyme, at least one polysaccharide lyases (PLs) enzyme, at least one carbohydrate esterases (CEs) enzyme, at least one carbohydrate-binding modules (CBM) enzyme, at least one auxiliary activities (AAs) enzyme or any combination thereof.

[0137] In some examples, the at least one bacterium produces at least one of (i) at least one glycoside hydrolase (GH) enzyme, (ii) at least one glycosyltransferase (GT) enzyme, (iii) at least one polysaccharide lyases (PLs) enzyme, (iv) at least one carbohydrate esterases (CEs) enzyme, (v) at least one carbohydrate-binding modules (CBM) enzyme, (vi) at least one auxiliary activities (AAs) enzyme or (vii) any combination thereof.

[0138] In some embodiments, the CAZome comprise at least one glycoside hydrolase (GH) enzyme and/or at least one glycosyltransferase (GT) enzyme.

[0139] In some examples, the at least one bacterium produces at least one of (i) at least one glycoside hydrolase (GH) enzyme, (ii) at least one glycosyltransferase (GT) enzyme or (iii) any combination thereof.

[0140] In some embodiments, the at least one bacterium produces at least one glycosyltransferase (GT) enzyme.

[0141] As used herein glycosyltransferase (GT) refers to an enzyme that establish natural glycosidic linkages by catalyzing the transfer of saccharide moieties from an activated nucleotide sugar (also known as the “glycosyl donor”) to a nucleophilic glycosyl acceptor molecule.

[0142] In some embodiments, the at least one glycosyltransferase enzyme is from at least one of (i) GT4, (ii) GT2, (iii) a combination thereof.

[0143] In some embodiments, the at least one glycosyltransferase enzyme is a GT4 enzyme.

[0144] In some embodiments, the at least one GT4 enzyme is at least one of sucrose synthase (EC 2.4.1.13); sucrose-phosphate synthase (EC 2.4.1.14); α-glucosyltransferase (EC 2.4.1.52); lipopolysaccharide N-acetylglucosaminyltransferase (EC 2.4.1.56); phosphatidylinositol α-mannosyltransferase (EC 2.4.1.57); GDP-Man: Man1GlcNAc2-PP-dolichol α-1,3-mannosyltransferase (EC 2.4.1.132); GDP-Man: Man3GlcNAc2-PP-dolichol/Man4GlcNAc2-PP-dolichol α-1,2-mannosyltransferase (EC 2.4.1.131); digalactosyldiacylglycerol synthase (EC 2.4.1.141); 1,2-diacylglycerol 3-glucosyltransferase (EC 2.4.1.157); diglucosyl diacylglycerol synthase (EC 2.4.1.208); trehalose phosphorylase (EC 2.4.1.231); NDP-Glc: α-glucose α-glucosyltransferase/α,α-trehalose synthase (EC 2.4.1.245); GDP-Man: Man2GlcNAc2-PP-dolichol α-1,6-mannosyltransferase (EC 2.4.1.257); UDP-GlcNAc: 2-deoxystreptamine α-N-acetylglucosaminyltransferase (EC 2.4.1.283); UDP-GlcNAc: ribostamycin α-N-acetylglucosaminyltransferase (EC 2.4.1.285); UDP-Gal α-galactosyltransferase (EC 2.4.1.-); UDP-Xyl α-xylosyltransferase (EC 2.4.2.-); UDP-GlcA α-glucuronyltransferase (EC 2.4.1.-); UDP-Glc α-glucosyltransferase (EC 2.4.1.-); UDP-GalNAc: GalNAc-PP-Und α-1,3-N-acetylgalactosaminyltransferase (EC 2.4.1.306); UDP-GalNAc: N,N′-diacetylbacillosaminyl-PP-Und α-1,3-N-acetylgalactosaminyltransferase (EC 2.4.1.290); ADP-dependent α-maltose-1-phosphate synthase (2.4.1.342); [retaining] UDP-GlcNAc: polypeptide α-N-acetylglucosaminyltransferase (EC 2.4.1.-); UDP-GlcNAc: α-N-acetylglucosaminyltransferase (EC 2.4.1.-); GDP-Man: α-1,4-mannosyltransferase (EC 2.4.1.-)

[0145] In some examples, the CAZymes of the GT4 family contain at least two gene copies, at times at least three gene copies, at times at least five gene copies, at times at least seven gene copies, at times at least ten gene copies, at times at least 12 gene copies, at times at least 15 gene copies.

[0146] In some examples, the CAZymes of the GT4 family contain two gene copies, at times three gene copies, at times five gene copies, at times seven gene copies, at times ten gene copies, at times 12 gene copies, at times 15 gene copies.

[0147] In some examples, the CAZymes of the GT4 family contain 16 gene copies.

[0148] In some embodiments, the at least one glycosyltransferase enzyme is a GT2 enzyme.

[0149] In some embodiments, the at least one GT2 enzyme is at least one of cellulose synthase (EC 2.4.1.12); chitin synthase (EC 2.4.1.16); dolichyl-phosphate β-D-mannosyltransferase (EC 2.4.1.83); dolichyl-phosphate β-glucosyltransferase (EC 2.4.1.117); N-acetylglucosaminyltransferase (EC 2.4.1.-); N-acetylgalactosaminyltransferase (EC 2.4.1.-); hyaluronan synthase (EC 2.4.1.212); chitin oligosaccharide synthase (EC 2.4.1.-); β-1,3-glucan synthase (EC 2.4.1.34); β-1,4-mannan synthase (EC 2.4.1.-); β-mannosylphosphodecaprenol-mannooligosaccharide α-1,6-mannosyltransferase (EC 2.4.1.199); UDP-Galf: rhamnopyranosyl-N-acetylglucosaminyl-PP-decaprenol β-1,4/1,5-galactofuranosyltransferase (EC 2.4.1.287); UDP-Galf: galactofuranosyl-galactofuranosyl-rhamnosyl-N-acetylglucosaminyl-PP-decaprenol β-1,5/1,6-galactofuranosyltransferase (EC 2.4.1.288); dTDP-L-Rha: N-acetylglucosaminyl-PP-decaprenol α-1,3-L-rhamnosyltransferase (EC 2.4.1.289); alternating β-1,3/4-N-acetylmannan synthase (2.4.1.-); UDP-GlcA: N-acetylglucosaminyl-proteoglycan β-1,4-glucuronosyltransferase (EC 2.4.1.225); [inverting] UDP-Glc: glycocin S-β-glucosyltransferase (EC 2.4.1.-); [inverting] UDP-Glc: protein O-β-glucosyltransferase (EC 2.4.1.-).

[0150] In some examples, the CAZymes of the GT2 family contain at least two gene copies, at times at least three gene copies, at times at least five gene copies, at times at least seven gene copies, at times at least eight gene copies.

[0151] In some examples, the CAZymes of the GT2 family contain two gene copies, at times three gene copies, at times five gene copies, at times seven gene copies, at times eight gene copies.

[0152] In some examples, the CAZymes of the GT2 family contain nine gene copies. In some embodiments, the at least one bacterium produces at least one glycoside hydrolase (GH) enzyme.

[0153] As used herein glycoside hydrolase (GH) refers to an enzyme that catalyzes the hydrolysis of glycosidic bonds in complex sugars.

[0154] In some embodiments, the at least one glycoside hydrolase enzyme is from GH4.

[0155] In some embodiments, the at least one GH4 enzyme is at least one of maltose-6-phosphate glucosidase (EC 3.2.1.122); α-glucosidase (EC 3.2.1.20); α-galactosidase (EC 3.2.1.22); 6-phospho-β-glucosidase (EC 3.2.1.86); α-glucuronidase (EC 3.2.1.139); α-galacturonase (EC 3.2.1.67); palatinase (EC 3.2.1.-). In some embodiments, the at least one glycoside hydrolase enzyme is at least one of (i) GH13, (ii) GH32, (iii) GH31, (iv) GH16 or (v) a combination thereof.

[0156] In some embodiments, the at least one glycoside hydrolase enzyme is at least one of GH13.

[0157] In some examples, the CAZymes of the GH13 family contain at least two gene copies, at times at least three gene copies, at times at least five gene copies, at times at least seven gene copies, at times at least eight gene copies.

[0158] In some examples, the CAZymes of the GH13 family contain two gene copies, at times three gene copies, at times five gene copies, at times seven gene copies, at times eight gene copies.

[0159] In some examples, the CAZymes of the GH13 family contain nine gene copies.

[0160] In some embodiments, the GH13 enzyme is at least one of GH13_31, GH13_29, GH13_18, GH13_14, GH13_5 or a combination thereof.

[0161] In some embodiments, the at least one glycoside hydrolase enzyme is at least one of GH32.

[0162] In some embodiments, the GH32 enzyme is at least one of invertase (EC 3.2.1.26); endo-inulinase (EC 3.2.1.7); β-2,6-fructan 6-levanbiohydrolase (EC 3.2.1.64); endo-levanase (EC 3.2.1.65); exo-inulinase (EC 3.2.1.80); fructan β-(2,1)-fructosidase/1-exohydrolase (EC 3.2.1.153); fructan β-(2,6)-fructosidase/6-exohydrolase (EC 3.2.1.154); sucrose: sucrose 1-fructosyltransferase (EC 2.4.1.99); fructan: fructan 1-fructosyltransferase (EC 2.4.1.100); sucrose: fructan 6-fructosyltransferase (EC 2.4.1.10); fructan: fructan 6G-fructosyltransferase (EC 2.4.1.243); levan fructosyltransferase (EC 2.4.1.-); [retaining] sucrose: sucrose 6-fructosyltransferase (6-SST) (EC 2.4.1.-); cycloinulo-oligosaccharide fructanotransferase (EC 2.4.1.-).

[0163] In some examples, the CAZymes of the GH32 family contain at least two gene copies, at times at least three gene copies, at times at least five gene copies, at times at least seven gene copies, at times at least eight gene copies.

[0164] In some examples, the CAZymes of the GH32 family contain two gene copies, at times three gene copies, at times five gene copies, at times seven gene copies, at times eight gene copies.

[0165] In some examples, the CAZymes of the GH32 family contain nine gene copies.

[0166] In some embodiments, the at least one glycoside hydrolase enzyme is at least one of GH31.

[0167] In some embodiments, the at least one glycoside hydrolase enzyme is at least one of GH16.

[0168] In some embodiments, the at least bacterium produces at least one of an amylases and/or a glucoamylase.

[0169] In some embodiments, the at least bacterium produces at least one of an auxiliary activity enzyme. An auxiliary activity enzyme refers to one or more families of catalytic proteins that are involved in plant cell degradation through an ability to help other enzymes, such as GH, PL enzymes gain access to the carbohydrates comprising the algae cell wall.

[0170] In some embodiments, the at least bacterium produces at least one enzyme from the enzyme families listed in Table 3.

[0171] In some embodiments, the at least bacterium produces CAZymes as shown in Table 3.

[0172] It should be noted that each row in Table 3 may be considered as a separate embodiment of the present disclosure and hence the at least one bacterium in accordance with the present disclosure may produce one or more enzymes in each one of the enzyme family (listed in separate rows) as well as one or more enzymes from each one of the enzymes family.

[0173] In some embodiments, the at least one bacterium comprises for each enzyme family listed in Table 3 number of copies±50%, at times±30%, at times±20%, at times±10%, at times±5% as recited in Table 3 for each enzyme family.

[0174] In some embodiments, the at least bacterium comprises for each enzyme family listed in Table 3 number of copies recited in Table 3.

[0175] In some embodiments, the at least bacterium is capable of modulating each one of the activities listed in Table 3.

[0176] As described herein, the at least one bacterium is capable of hydrolyzing at least one carbohydrate.

[0177] In some embodiments, the at least one bacterium is capable of hydrolyzing starch/glycogen.

[0178] In some embodiments, the at least one bacterium is capable of hydrolyzing starch/glycogen into amino sugars and nucleotide sugars. In some other embodiments, the at least one bacterium is capable of hydrolyzing starch/glycogen into D-glucose. In some other embodiments, the at least one bacterium is capable of hydrolyzing starch/glycogen into D-glucose-6P.

[0179] The at least one bacterium was characterized by an Average Nucleotide Identity (ANI) as compared to other known bacteria.

[0180] In some embodiments, the at least bacterium has an Average Nucleotide Identity (ANI) of at least 65% with at least one sequence of Bacillus sp. N1-1 CP 046564, Alkalihalobacillus macyae strain DSM 16346 (JMM-4) or Alteribacter populi strain FJAT 45347.

[0181] In some embodiments, the at least bacterium has an Average Nucleotide Identity (ANI) of at least 65% with Bacillus sp. N1-1 CP 046564.

[0182] Bacillus sp. N1-1 CP 046564 may be denoted by Taxonomy ID: 2682541, or by Accession No.: PRJNA592026, or by GenBank: CP046564.1. The sequence of Bacillus sp. N1-1 CP 046564 was downloaded from: https://www.ncbi.nlm.nih.gov/assembly/GCF_009818105.1

[0183] In some embodiments, the at least bacterium has an Average Nucleotide Identity (ANI) of at least 65%, at times at least 70%, at times at least 75% with Alkalihalobacillus macyae DSM 16346.

[0184] Alkalihalobacillus macyae strain DSM 16346 (JMM-4) may be denoted by Taxonomy ID: 157733, or by Accession No.: PRJNA286270. The sequence of Alkalihalobacillus macyae DSM 16346 was downloaded from: https://www.ncbi.nlm.nih.gov/assembly/GCF_001039475.1

[0185] In some embodiments, the at least bacterium has an Average Nucleotide Identity (ANI) of at least 65% with Alteribacter populi.

[0186] Alteribacter populi strain FJAT 45347 may be denoted by Taxonomy ID: 2011011, or by Accession No.: PRJNA390025. The sequence of Alteribacter populi FJAT 45347 was downloaded from: https://www.ncbi.nlm.nih.gov/assembly/GCF_002352765.1

[0187] In some embodiments, the at least bacterium has an Average Nucleotide Identity (ANI) of at least 70%, at least 75%, at least 80%, at least 85%, at least 90%, at least 95%, at least 99% with a sequence of Bacillus sp. N1-1 CP 046564.

[0188] In some embodiments, the at least bacterium has an Average Nucleotide Identity (ANI) of at least 65%, at least 70%, at least 75% with a sequence of Alkalihalobacillus macyae strain DSM 16346 (JMM-4).

[0189] In some embodiments, the at least bacterium has an Average Nucleotide Identity (ANI) of at least 60%, at least 65% with a sequence of Alteribacter populi strain FJAT 45347.

[0190] It should be noted that when referring to phylogenetic analysis based on the whole-genomic sequence, the % identity score to other available genomes may be based on coverage rate of less than 100% at times less than about 90%, less than about 80%, less than about 70% and at times about 66% between the two genomes.

[0191] The term identity (% identity) as used herein refer to two or more nucleic acid sequences that are the same. In the context of the present disclosure the sequence identity encompasses transcription changes of DNA to RNA, e.g. T and U are considered identical. The identity may exist over a region of a sequence that is considered by those versed in the art as the whole genomic sequence or any coverage rate thereof as well as the variable region of the 16S rRNA.

[0192] In some embodiments, the identity exists over the length the 16S rRNA or a portion thereof of the variable region.

[0193] In some embodiments, the identity exists over the whole-genomic sequence.

[0194] In some embodiments, the identity exists over a coverage rate of less than 100% at times less than about 90%, less than about 80%, less than about 70% and at times about 66% between the two genomes.

[0195] The % identity between two or more nucleic acid sequences is determined for the two or more sequences when compared and aligned for maximum correspondence. In the context of the present disclosure, sequences (nucleic acid) as described herein having % identity are considered to have the same function/activity of the original sequence to which identity is calculated to.

[0196] The threshold sequence identity may be 85%, at times 86%, at times 87%, at times 88%, at times 89%, at times 90%, at times 91%, at times 92%, at times 93%, at times 94%, at times 95%, at times 96%, at times 97%, at times 98%, at times 99% with each one of the % identity denoted herein constitute a separate embodiment of the invention.

[0197] In some embodiments, the at least bacterium has a full genomic sequence that is at least about 60%, at times at least about 65%, at times at least about 70%, at times at least about 75%, at times at least about 80%, at times at least about 85%, at times at least about 90%, at times at least about 95%, at times at least about 99% identical with SEQ ID NO:1 (Alkalihalobacillus hwajinpoensis SW-72).

[0198] In some embodiments, the at least bacterium has a full genomic sequence that is about 60%, at times about 65%, at times about 70%, at times about 75%, at times about 80%, at times about 85%, at times about 90%, at times about 95%, at times about 99% identical to SEQ ID NO:1.

[0199] In some embodiments, the at least bacterium has a full genomic sequence that is between about 60% and about 99% identical to SEQ ID NO:1, at times between about 65% and about 99%, at times between about 70% and about 99%, at times between about 75% and about 99%, at times between about 80% and about 99%, at times between about 85% and about 99%, at times between about 90% and about 99%, at times between about 95% and about 99% identical to SEQ ID NO:1.

[0200] Alkalihalobacillus hwajinpoensis SW-72 may be denoted by Taxonomy ID: 208199.

[0201] The 16S rRNA sequence of Alkalihalobacillus hwajinpoensis SW-72 is provided by GenBank accession No. AF541966, denoted herein by SEQ ID NO:1.

[0202] In some embodiments, the at least one bacterium is isolated from sea urchin.

[0203] In some embodiments, the at least one bacterium is isolated from sea urchin Tripneustes gratilla.

[0204] In some embodiments, the at least one bacterium is from the genus Alkalihalobacillus.

[0205] Alkalihalobacillus is a genus of gram-positive or gram-variable rod-shaped bacteria in the family Bacillaceae from the order Bacillales.

[0206] In some embodiments, the at least one bacterium belongs to the Alkalihalobacillus hwajinpoensis species.

[0207] In some embodiments, the at least one bacterium belongs to one or more of Alkalihalobacillus akibai, Alkalihalobacillus alcalophilus, Alkalihalobacillus algicola, Alkalihalobacillus alkalilacus, Alkalihalobacillus alkalinitrilicus, Alkalihalobacillus alkalisediminis, Alkalihalobacillus berkeleyi, Alkalihalobacillus bogoriensis, Alkalihalobacillus caeni, Alkalihalobacillus clausii, Alkalihalobacillus decolorationis, Alkalihalobacillus gibsonii, Alkalihalobacillus halodurans, Alkalihalobacillus hemicellulosilyticus, Alkalihalobacillus hemicentroti, Alkalihalobacillus hunanensis, Alkalihalobacillus hwajinpoensis, Alkalihalobacillus kiskunsagensis, Alkalihalobacillus krulwichiae, Alkalihalobacillus ligniniphilus, Alkalihalobacillus lindianensis, Alkalihalobacillus lonarensis, Alkalihalobacillus macyae, Alkalihalobacillus marmarensis, Alkalihalobacillus miscanthi, Alkalihalobacillus murimartini, Alkalihalobacillus nanhaiisediminis, Alkalihalobacillus oceani, Alkalihalobacillus okhensis, Alkalihalobacillus okuhidensis, Alkalihalobacillus oshimensis, Alkalihalobacillus patagoniensis, Alkalihalobacillus pseudalcaliphilus, Alkalihalobacillus pseudofirmus, Alkalihalobacillus shaceensis, Alkalihalobacillus trypoxylicola, Alkalihalobacillus urbisdiaboli, Alkalihalobacillus wakoensis or Alkalihalobacillus xiaosiensis species.

[0208] In some embodiments, the at least bacterium has a full genomic sequence that is at least about 60%, at times at least about 65%, at times at least about 70%, at times at least about 75%, at times at least about 80%, at times at least about 85%, at times at least about 90%, at times at least about 95%, at times at least about 99% identical with SEQ ID NO:2.

[0209] In some embodiments, the at least bacterium has a full genomic sequence that is about 60%, at times about 65%, at times about 70%, at times about 75%, at times about 80%, at times about 85%, at times about 90%, at times about 95%, at times about 99% identical to SEQ ID NO:2.

[0210] In some embodiments, the at least bacterium has a full genomic sequence that is between about 60% and about 99% identical to SEQ ID NO:2, at times between about 65% and about 99%, at times between about 70% and about 99%, at times between about 75% and about 99%, at times between about 80% and about 99%, at times between about 85% and about 99%, at times between about 90% and about 99%, at times between about 95% and about 99% identical to SEQ ID NO:2.

[0211] In some embodiments, the at least one bacterium has a sequence denoted by SEQ ID NO: 2.

[0212] In accordance with some other aspects, the present disclosure provides a bacterial culture comprising a biomass composition and a bacterium or a microbial consortium comprising the bacterium, wherein the bacterium is a marine-derived halotolerant bacterium or any isolate, mutant, spores, enzymes or extracts thereof and/or a conditioned culture medium of the at least one bacterium and/or secreted compounds from the at least one bacterium, wherein the bacterium is characterized by one or more of (i) comprises various CAZymes in its genome, (ii) produces various CAZymes, (iii) capable of hydrolyzing at least one carbohydrate.

[0213] “Biomass” as used herein means living matter and refers to organic biological matter.

[0214] There are diverse sources of biomass including agricultural, forest, waste, as well as algae, for example, wood, crops, seaweed or animal wastes.

[0215] Biomass includes, but is not limited to, bioenergy crops, agricultural residues, municipal solid waste, industrial solid waste, sludge from paper manufacture, yard waste, wood and forestry waste. Examples of biomass include, but are not limited to, corn grain, corn cobs, crop residues such as corn husks, corn stover, grasses, wheat, wheat straw, barley, barley straw, hay, rice straw, switchgrass, waste paper, sugar cane bagasse, sorghum, soy, components obtained from milling of grains, trees, branches, roots, leaves, wood chips, sawdust, shrubs and bushes, vegetables, fruits, flowers and animal manure.

[0216] In some embodiments, the biomass is a wet biomass.

[0217] In some embodiments, the biomass is from wood and agricultural products.

[0218] In some embodiments, the biomass is from solid waste.

[0219] In some embodiments, the biomass is from bacteria and fungi.

[0220] In some embodiments, the biomass is from alcohol, such as ethanol.

[0221] In some embodiments, the biomass has a high carbohydrate value.

[0222] In some embodiments, the biomass comprises carbohydrates that may be hydrolyzed (degraded) by at least one CAZymes.

[0223] In some embodiments, the biomass comprises carbohydrates that may be hydrolyzed (degraded) by at least one CAZymes detailed in Table 3.

[0224] In some other embodiments, the biomass includes algal biomass that has a high carbohydrate value.

[0225] In some further examples, the biomass comprises about 50% carbohydrate, at times about 60%, at times about 70%, at times about 80% carbohydrate (w/w).

[0226] In some other examples, the biomass comprises high amounts of polysaccharides.

[0227] In some further examples, the biomass comprises about 50% polysaccharides, at times about 60%, at times about 70%, at times about 80% polysaccharides (w/w).

[0228] The biomass is in accordance with some examples from an algae source.

[0229] In some embodiments, the biomass is from alga.

[0230] In some embodiments, the biomass is an algae extract.

[0231] In some other embodiments, the biomass is from microalgal.

[0232] As appropriated, alga or algae refers to a diverse group of photosynthetic organisms that may be in unicellular forms or multicellular forms. Algae are typically found in a wide range of aquatic and terrestrial habitats, including oceans and freshwater lakes as well as soil.

[0233] The biomass can be from various source of algae.

[0234] In some examples, the biomass is from green algae, red algae, brown algae or any combination thereof.

[0235] In some examples, the biomass is from green algae.

[0236] In some other examples, the biomass is from red algae. In some further examples, the biomass is from brown algae.

[0237] In some embodiments, the biomass is from Ulva genus. In some embodiments, the biomass is from an Ulva.

[0238] As appropriated, ulva refers to a genus of green algae commonly known as sea lettuce that is a multicellular marine macroalgae typically found in shallow water environments such as estuaries, tide pools, and rocky shores.

[0239] In some other embodiments, the biomass is from Gracillaria sp.

[0240] As appropriated, Gracilaria refers to a genus of red algae, commonly known as “red seaweed,” typically found in marine environments worldwide.

[0241] In some embodiments, the biomass is from Gracillaria sp.

[0242] In some further embodiments, the biomass is from kelp.

[0243] As appropriated, Kelp refers to a type of large brown algae that is found in cold, nutrient-rich marine environments around the world.

[0244] In some embodiments, the biomass is from kelp.

[0245] In accordance with some other aspects, the present disclosure provides a method of hydrolyzing at least one carbohydrate, the method comprises contacting a biomass, biomass derivatives or compositions comprising biomass or any derivative thereof with a bacterium or a microbial consortium comprising the bacterium, wherein the bacterium is a marine-derived halotolerant bacterium or any isolate, mutant, spores, enzymes or extracts thereof and/or a conditioned culture medium of the at least one bacterium and/or secreted compounds from the at least one bacterium, wherein the bacterium is characterized by one or more of (i) comprises various CAZymes in its genome, (ii) produces various CAZymes, (iii) capable of hydrolyzing at least one carbohydrate.

[0246] In some embodiments in which the biomass is an algal biomass or any extract thereof.

[0247] In some embodiments, the hydrolysis of polysaccharides by the method provides at least one monosaccharide. As appreciated, monosaccharide called simple sugar, refers to simplest form of sugar and the most basic units (monomers) from which all carbohydrates are built.

[0248] In some embodiments, the hydrolysis by the method provides amino sugars and nucleotide sugars.

[0249] In some embodiments, the hydrolysis by the method provides maltose, maltotriose, α-dextrins, glucose.

[0250] In some embodiments, the methos provides D-glucose or D-glucose-6P.

[0251] In some embodiments, the method provides a nutritional improved alga.

[0252] In accordance with some other aspects, the present disclosure provides a method of production of bioethanol products or metabolites comprising contacting a biomass, biomass derivatives or compositions comprising biomass or any derivative thereof with a bacterium or a microbial consortium comprising the bacterium, wherein the bacterium is a marine-derived halotolerant bacterium or any isolate, mutant, spores, enzymes or extracts thereof and/or a conditioned culture medium of the at least one bacterium and/or secreted compounds from the at least one bacterium, wherein the bacterium is characterized by one or more of (i) comprises various CAZymes in its genome, (ii) produces various CAZymes, (iii) capable of hydrolyzing at least one carbohydrate.

[0253] In accordance with some other aspects, the present disclosure provides a method of production of bioenergy products or metabolites comprising contacting a biomass, biomass derivatives or compositions comprising biomass or any derivative thereof with a bacterium or a microbial consortium comprising the bacterium, wherein the bacterium is a marine-derived halotolerant bacterium or any isolate, mutant, spores, enzymes or extracts thereof and/or a conditioned culture medium of the at least one bacterium and/or secreted compounds from the at least one bacterium, wherein the bacterium is characterized by one or more of (i) comprises various CAZymes in its genome, (ii) produces various CAZymes, (iii) capable of hydrolyzing at least one carbohydrate.

[0254] In accordance with some other aspects, the present disclosure provides a method of production of bioethanol, the method comprising contacting a biomass, biomass derivatives or compositions comprising biomass or any derivative thereof with the bacterium or the microbial consortium comprising the bacterium, wherein the bacterium is a marine-derived halotolerant bacterium or any isolate, mutant, spores, enzymes or extracts thereof and/or a conditioned culture medium of the at least one bacterium and/or secreted compounds from the at least one bacterium, wherein the bacterium is characterized by one or more of (i) comprises various CAZymes in its genome, (ii) produces various CAZymes, (iii) capable of hydrolyzing at least one carbohydrate.

[0255] As used herein bioethanol also denoted as bioethanol fuel is produced mainly by sugar fermentation process.

[0256] The present disclosure also encompasses a bioreactor comprising a bacterial culture.

[0257] In accordance with some other aspects, the present disclosure provides a method of identification or isolating at least one bacterium, the method comprising: a) providing a sample comprising uncharacterized bacteria; b) subjecting the sample to a high salinity condition and/or high temperature conditions to obtain a treated sample; and c) selecting at least one bacterium from the treated sample, wherein said selected bacterium is capable of hydrolyzing at least carbohydrate.

[0258] In accordance with some aspect, it is provided a method of identification or isolating at least one bacterium, the method comprising: a) subjecting a sample comprising uncharacterized bacteria to a high salinity condition and/or high temperature conditions to obtain a treated sample; and b) selecting at least one bacterium from the treated sample, wherein said selected bacterium is capable of hydrolyzing at least carbohydrate.

[0259] In some embodiments, the sample comprises tissue samples from intestine of a marine urchin.

[0260] In accordance with some aspect, it is provided a method of identification or isolating at least one bacterium, the method comprising: a) providing a tissue sample from intestine of a marine urchin comprising uncharacterized bacteria; b) subjecting the sample to a high salinity condition and/or high temperature conditions to obtain a treated sample; and c) selecting at least one bacterium from the treated sample, wherein said selected bacterium is capable of hydrolyzing at least carbohydrate.

[0261] In accordance with some aspect, it is provided a method of identification or isolating at least one bacterium, the method comprising: a) subjecting a tissue sample from intestine of a marine urchin comprising uncharacterized bacteria to a high salinity condition and/or high temperature conditions to obtain a treated sample; and b) selecting at least one bacterium from the treated sample, wherein said selected bacterium is capable of hydrolyzing at least carbohydrate.

[0262] The selection of a bacterium that is capable of hydrolyzing at least carbohydrate can be done by any method capable of monitoring carbohydrate hydrolysis as described herein in the examples.

[0263] In some embodiments, the method of the invention for identification or isolating at least one bacterium may be applicable for selecting at least one bacterium capable of hydrolyzing at least one algal carbohydrate, optionally at least one algal polysaccharide.

[0264] In some embodiments, the method of the invention for identification or isolating at least one bacterium may be applicable for selecting at least one bacterium capable of hydrolyzing algal polysaccharide.

[0265] In some embodiments, the method of the invention for identification or isolating at least one bacterium may be applicable for selecting at least one bacterium capable of hydrolyzing an algal extract.

[0266] In some embodiments, the method of the invention for identification or isolating at least one bacterium may be applicable for selecting at least one bacterium capable of hydrolyzing an algal polysaccharide extract.

[0267] In some embodiments, the method of the invention for identification or isolating at least one bacterium may be applicable for selecting at least one bacterium capable of hydrolyzing an algal biomass.

[0268] In some embodiments, the method of the invention for identification or isolating at least one bacterium may be applicable for selecting at least one bacterium capable of hydrolyzing at least one of carrageenan, agar, cellulose, alginate, laminarin, fucoidan, ulvan, chitin, starch, xylan, rhamnan sulfate, chrysolaminarin, or any combination thereof.

[0269] In some embodiments, the method of the invention for identification or isolating at least one bacterium may be applicable for selecting at least one bacterium capable of hydrolyzing at least one of carrageenan, agar, alginate, laminarin, fucoidan, ulvan, xylan, rhamnan sulfate, chrysolaminarin or any combination thereof.

[0270] In some embodiments, the method of the invention for identification or isolating at least one bacterium may be applicable for selecting at least one bacterium capable of hydrolyzing an algal biomass, optionally polysaccharide extract, optionally comprising at least one of carrageenan, agar, starch, laminarin, ulvan or any combination thereof.

[0271] In some embodiments, the method of the invention for identification or isolating at least one bacterium may be applicable for selecting at least one bacterium capable of hydrolyzing at least one of carrageenan, agar, laminarin, ulvan or any combination thereof.

[0272] In some embodiments, the method of the invention for identification or isolating at least one bacterium may be applicable for selecting at least one bacterium capable of hydrolyzing at least one of carrageenan, laminarin, ulvan or any combination thereof.

[0273] In some embodiments, the method of the invention for identification or isolating at least one bacterium may be applicable for selecting at least one bacterium capable of hydrolyzing at least one of arrageenan, laminarin, ulvan or any combination thereof.

[0274] In accordance with some aspects, the present disclosure provides at least one bacterium capable of hydrolyzing at least carbohydrate obtained by a method comprising a) providing a sample comprising uncharacterized bacteria; b) subjecting the sample to a high salinity condition and/or high temperature conditions to obtain a treated sample; and c) selecting at least one bacterium from the treated sample, wherein said selected bacterium is capable of hydrolyzing at least carbohydrate.

[0275] In accordance with some aspects, the present disclosure provides at least one bacterium capable of hydrolyzing at least carbohydrate obtained by a method comprising: a) subjecting a sample comprising uncharacterized bacteria to a high salinity condition and/or high temperature conditions to obtain a treated sample; and b) selecting at least one bacterium from the treated sample, wherein said selected bacterium is capable of hydrolyzing at least carbohydrate.

[0276] In accordance with some aspects, the present disclosure provides at least one bacterium capable of hydrolyzing at least carbohydrate obtained by a method comprising: a) providing a tissue sample from intestine of a marine urchin comprising uncharacterized bacteria; b) subjecting the sample to a high salinity condition and/or high temperature conditions to obtain a treated sample; and c) selecting at least one bacterium from the treated sample, wherein said selected bacterium is capable of hydrolyzing at least carbohydrate.

[0277] In accordance with some aspects, the present disclosure provides at least one bacterium capable of hydrolyzing at least carbohydrate obtained by a method comprising: a) subjecting a tissue sample from intestine of a marine urchin comprising uncharacterized bacteria to a high salinity condition and/or high temperature conditions to obtain a treated sample; and b) selecting at least one bacterium from the treated sample, wherein said selected bacterium is capable of hydrolyzing at least carbohydrate.

[0278] In accordance with some aspects, the present disclosure provides at least one bacterium capable of hydrolyzing at least carbohydrate obtainable by a method comprising a) providing a sample comprising uncharacterized bacteria; b) subjecting the sample to a high salinity condition and/or high temperature conditions to obtain a treated sample; and c) selecting at least one bacterium from the treated sample, wherein said selected bacterium is capable of hydrolyzing at least carbohydrate.

[0279] In accordance with some aspects, the present disclosure provides at least one bacterium capable of hydrolyzing at least carbohydrate obtainable by a method comprising: a) subjecting a sample comprising uncharacterized bacteria to a high salinity condition and/or high temperature conditions to obtain a treated sample; and b) selecting at least one bacterium from the treated sample, wherein said selected bacterium is capable of hydrolyzing at least carbohydrate.

[0280] In accordance with some aspects, the present disclosure provides at least one bacterium capable of hydrolyzing at least carbohydrate obtainable by a method comprising: a) providing a tissue sample from intestine of a marine urchin comprising uncharacterized bacteria; b) subjecting the sample to a high salinity condition and/or high temperature conditions to obtain a treated sample; and c) selecting at least one bacterium from the treated sample, wherein said selected bacterium is capable of hydrolyzing at least carbohydrate.

[0281] In accordance with some aspects, the present disclosure provides at least one bacterium capable of hydrolyzing at least carbohydrate obtainable by a method comprising: a) subjecting a tissue sample from intestine of a marine urchin comprising uncharacterized bacteria to a high salinity condition and/or high temperature conditions to obtain a treated sample; and b) selecting at least one bacterium from the treated sample, wherein said selected bacterium is capable of hydrolyzing at least carbohydrate.

[0282] The methods of the present disclosure are applicable to various carbohydrates as described herein.

[0283] The following summary may be considered in the context of the present disclosure based on the examples described below.

[0284] The two phylogenetic analyses following the whole genome sequencing resulted in some conflict as each allocated isolated bacterium under different taxonomic lineage of either Alkalihalobacillus or Bacillus. This conflict can be attributed to the relatively low coverage during genome comparison with other bacteria in the database as only ⅔ of genome sequences were aligned successfully against other bacteria. Moreover, the two tools that were used for genome comparison differs in their BLAST-algorithm and may contribute to the disagreement in bacterial identification. An uncertainty in the identification of a bacterium as either Bacilli or Alkalihalobacilli seems common as only recently six species of the Bacillus genus were reclassified following a comparative genomic analysis under the new genus taxon of Alkalihalobacillus. In fact, one of these reclassified microbes was Alkalihalobacillus hwajinpoensis SW-72, which has been identified in the current study as bacterial strain with the most similar 16S rRNA gene sequence to that of the Alkalihalobacillus sp. isolate. Beside this genetic similarity, the A. hwajinpoensis SW-72 strain, originally isolated from the East China Sea in Korea, also present other physiological characteristics that are shared with the Alkalihalobacillus sp. isolate. Among, are the optimal growth at temperature between 3° and 35° C., and at salinity between 2 and 5 2-5%. However, while A. hwajinpoensis SW-72 was reported for its activity in decomposing of various carbohydrates as melibiose, D-cellobiose, D-ribose D-galactose, D-mannose, or D-raffinose, no report was found on potential activity of this strain in starch degradation and its CAZome is lack of genes for amylases. It was therefore assumed that the isolated bacterium is a novel halophilic specie of the genus Alkalihalobacillus which is also lacking the ability to grow in a non-salted environment as demonstrated in the present disclosure.

[0285] As novel α-amylases are still of interest for industrial uses, the comparative analysis of the bacterial CAZome content encompassed specific members of the Bacillus genus which are currently used for production of commercial α-amylases, as well as several halophilic bacteria that consist of hydrolases or polylyases in their CAZome. Among the compared bacteria were members of the genus Bacillus (i.e. B. subtilis, B. cereus, B. licheniformis, B. amyloliquefaciens and B. paralicheniformis) which presents high commercial value due to their use in the food industry⁴. The comparative analysis of bacterial CAZomes revealed that only one GH was found in all of them (GH23). On the other hand, the interesting differences in GH content can be attributed to different metabolisms of dietary polysaccharides, including starch.

[0286] The most diverse CAZyme family in the different bacterial CAZomes was GH13 which contained 21 subfamilies (as shown herein below). While among these, 5 subfamilies (GH5, GH14, GH18, GH29, GH31) were discovered in the genome of Alkalihalobacillus sp., with the unique and highest number of genomic copies found for GH13_14 encodes for pullulanase (EC 3.2.1.41). This enzyme hydrolyzes the α-1,6 glucosidic linkages in starch, amylopectin and pullulan and is essential to complete an efficient conversion of the polysaccharides into small fermentable sugars.

[0287] The highest similarity was found between the isolated Alkalihalobacillus sp. and the halophilic Bacillus sp. N1-1 which is also capable of starch degradation. The comparison of representative genera of Bacillus with Alkalihalobacillus sp. revealed that two genes of GH13_29 (α-glucosidase) and GH13_31 (Hexosyltransferases) were shared in the genomes among all Bacillus species and Alkalihalobacillus sp. However, the analyses also highlighted the fact that fundamental knowledge on bacterial CAZymes content could not be used as a sole indicator for enzymatic activity per se. The latter has been evident in the examination of the two strains of Croceivigra radicis which own a similar set of five α-amylases in their genomes but were both found uncapable of starch hydrolysis in vitro¹⁸. In contrary, hydrolysis of starch has been reported in Virgibacillus alimentarius although this bacterium consists of only a single α-amylase of GH13_20 (in four copies) in the genome.

[0288] The in vitro experiments confirmed that the isolated bacterium Alkalihalobacillus sp. is capable to grow under salinity of at least 1%, for example, between 1 and 4%, and temperature of at least 25° C., for example between 25 and 37° C. Nevertheless, stability of α-amylases of this bacterium at a more extreme conditions as higher salinity or temperature is considerable. This has been evident in several thermostable α-amylases currently used in the industry which are produced by members of the genus Bacillus of B. subtilis, B. licheniformis, or B. amyloliquefaciens, while these bacteria have been isolated from habitats of a more moderate temperature as the gastrointestinal tract of ruminants, soil or plant roots. Another evidence is from the study of the marine bacterium Pseudoalteromonas neustonica SM1927 which was isolated from habitat of salinity level of 3% but revealed an optimal hydrolysis of starch at much higher salinity between 6-10% in the in vitro trials.

[0289] The integration of in vitro experiments for the study of a potential activity in an isolated bacterium together with genomics analyses, as performed in the current research, is of highly important for better understanding of the potential mechanism in which the substrate is metabolized and the related set of genes for the process. This is also since in some cases, an efficient degradation of a substrate into desired chemicals may require the construction of a set of enzymes which may not always derived from a single organism (e.g. bacterium). With this respect, the metabolism of starch in free-living bacteria has been proposed to require the following set of core genes (each in at least one copy) of ADP-glucose pyrophosphorylase (GH13_18), glycogen synthase, glycogen phosphorylase, and branching and debranching enzymes. While consisting all of them in its genome, Alkalihalobacillus sp. was also found to hold few other genes that are related to starch metabolism of families GH13_5, GH13_14, and GH13_31, which are involved in the metabolism of the malto-oligosaccharides of maltodextrin, maltose and dextrin³. The presence of GH13_31 and GH31 in the isolated Alkalihalobacillus sp. is of highly important as these CAZymes are responsible for the consequent metabolism of the respected oligosaccharides dextrin and maltose, into monosaccharides of D-glucose. If not occur, the entire metabolism of starch may be inhibited by the accumulation of either of these oligosaccharides dextrin or maltose. Following this, it was proposed the isolated Alkalihalobacillus sp. to allow a complete metabolism of starch into either D-glucose, D-glucose 6P, or UDP-glucose, with the latter as a precursor for amino sugar and nucleotide sugar metabolism.

[0290] The term “about” as used herein indicates values that may deviate up to 1%, more specifically 5%, more specifically 10%, more specifically 15%, and in some cases up to 20% higher or lower than the value referred to, the deviation range including integer values, and, if applicable, non-integer values as well, constituting a continuous range.

[0291] It should be noted that various embodiments of this invention may be presented in a range format. The description of a range should be considered to have specifically disclosed all the possible sub ranges as well as individual numerical values within that range. For example, description of a range such as from 1 to 6 or between 1 and 6 should be considered to have specifically disclosed sub ranges such as from 1 to 3, from 1 to 4, from 1 to 5, from 2 to 4, from 2 to 6, from 3 to 6 etc., as well as individual numbers within that range, for example, 1, 2, 3, 4, 5, and 6.

[0292] It is to be understood that the terminology used herein is used for the purpose of describing particular embodiments only and not intended to be limiting since the scope of the present invention will be limited only by the appended claims and equivalents thereof.

[0293] Throughout this specification and the Examples and claims which follow, unless the context requires otherwise, the word “comprise”, and variations such as “comprises” and “comprising”, will be understood to imply the inclusion of a stated integer or step or group of integers or steps but not the exclusion of any other integer or step or group of integers or steps.

[0294] It must be noted that, as used in this specification and the appended claims, the singular forms “a”, “an” and “the” include plural referents unless the content clearly dictates otherwise.

[0295] It is appreciated that certain features of the invention, which are, for clarity, described in the context of separate embodiments, may also be provided in combination in a single embodiment. Conversely, various features of the invention, which are, for brevity, described in the context of a single embodiment, may also be provided separately or in any suitable sub combination or as suitable in any other described embodiment of the invention. Certain features described in the context of various embodiments are not to be considered essential features of those embodiments unless the embodiment is inoperative without those elements.

[0296] It should be noted that the various embodiments and examples detailed herein in connection with various aspects of the invention may be applicable to one or more aspects disclosed herein. It should be further noted that any embodiment described herein, for example, related to components of the food ingredient, may be applied separately or in various combinations. Various embodiments and aspects of the present invention as delineated hereinabove and as claimed in the claims section below find experimental support in the following examples. The phrases “in another embodiment” or any refence made to embodiment as used herein do not necessarily refer to different embodiment, although it may. Thus, various embodiments of the invention can be combined (from the same or from different aspects) without departing from the scope of the invention.

[0297] Various embodiments and aspects of the present invention as delineated herein above and as claimed in the claims section below find experimental support in the following examples.

[0298] Disclosed and described, it is to be understood that this invention is not limited to the particular examples, bacterium and methods steps, disclosed herein as such methods steps and reactors may vary somewhat. It is also to be understood that the terminology used herein is used for the purpose of describing particular embodiments only and not intended to be limiting since the scope of the present invention will be limited only by the appended claims and equivalents thereof.

[0299] The following examples are representative of techniques employed by the inventors in carrying out aspects of the present invention. It should be appreciated that while these techniques are exemplary of preferred embodiments for the practice of the invention, those of skill in the art, in light of the present disclosure, will recognize that numerous modifications can be made without departing from the spirit and intended scope of the invention.

### Some Non-Limiting Examples

### Bacterial Isolation

[0300] The gut microbiome of sea urchin Tripneustes gratilla was selected for isolation of starch-hydrolyzing bacteria as it contains bacteria which were correlated with starch-rich dietary seaweeds of Ulva or Gracilaria. To enrich the gut with such bacteria, adult sea urchins were fed a mono-specific algal diet of Ulva fasciata during eight weeks prior harvesting of the gut. Enrichment of gut bacteria continued in the lab in flasks with 100 ml marine broth media at salinity of 4% (as in the Red Sea) by incubation at 25° C. as in the echinoculture facility (FIG. 1). To enrich the targeted heterotrophic bacteria, first the content of organic and inorganic residuals was reduced from the crude gut by diluting the culture medium by half every three days along 18 days using a similar bacterial-free medium. Three aliquots of 100 μl each were then sampled from each of the flasks and planted separately on an agar plate (1.5%) with the same medium. Bacterial colonies were transferred to new plates until their isolation. Each of the isolated colonies was transferred to a sterile flask that contained 100 ml of mineral salts liquid medium (4% salinity) and was provided also with a polysaccharides extract from Ulva (Trivedi, Nitin, et al.) as the sole source of carbohydrates at a rate of 2%. After 24 h, 100 μl of the culture was replanted on agar plates with the same Ulva-polysaccharides extract (2%) for 24 h at 37° C., followed by the examination of polylyases activity through the Cetyl pyridinium chloride activity assay. A similar reaction was performed in agar plates of which Ulva-polysaccharides extract was not added as a control (FIG. 1).

### In Vitro Growth and α-Amylase and Glucoamylase Activity Measurements

[0301] Bacterial growth and α-amylase activity were measured in cultures at different salinities and temperatures using the recommended liquid media for starch degrading bacteria with 0.2% of commercial starch (Sigma-Aldrich, Israel).

[0302] In the first experiment, the isolated Alkalihalobacillus sp. was examined in cultures at different salinities of 0, 1, 2, 3, or 4% (Red Sea salt). A following experiment was performed at different temperatures of 25, 30, and 37° C., all at a salinity level of 3% which was identified in first experiment as favorable for both growth and amylases activity. Both experiments included two sets of control treatment (in triplicates): the first was of starch-free culture medium with the isolated bacterium; and the second was of starch-containing, bacterial-free, culture medium. In both experiments, 1 ml from an enriched culture of isolated Alkalihalobacillus was used as starter. Bacterial growth was measured according cell density at 600 nm while sampling of 1 ml from each culture once every 4 h during the first 48 h of the experiment, and once every 12 h during the following 48 h. Measurement of the exocellular amylases activity was performed at similar regime on similar samples of which the bacterial-free supernatant (100 μl) after centrifugation (10,000 rpm, 15 minutes) was used. The amylases activity assay was the recommended starch-iodine assay in which the bacterial-free supernatant was added to 400 μl of commercial 0.2% starch solution and incubated for 30 min at 50° C., prior stopping the activity with HCl and measuring the remained starch through the Iodine assay and following absorbance at 580 nm.

[0303] Statistical analysis of the data on growth or amylases activity was performed using two-way ANOVA and examined the effects of the various factors of time, salinity, or temperature.

### Genomic DNA Extraction, Genome Sequencing and Annotation

[0304] Bacterial genomic DNA was purified using the PureLink™ Microbiome Purification Kit following manufacturer protocol. Quality and quantity of genomic DNA were determined in qubit fluorometer and in an Agilent 2100 bioanalyzer. Whole-genome sequencing was performed using a MinION sequencer at the Research Resources Center (University of Illinois, Chicago). The Porechop tool (v0.2.4) was used to trim adapters from resulted sequence while an additional removal of internal adapters was made at identity threshold of 90%. Sequences shorter than 1000 bp were discarded. De novo assembly was performed using the Canu assembler³⁴ with a following error correction using Racon. The Circlator platform³⁶ was used for circularization of the contigs assembly into a complete genome. Illumina MiSeq platform and Nextera XT kit were used for generation of short-read sequences which were assigned together with the long-read sequence to an iterative polishing step of removal of the remained errors as those in repeated region. The Unicycler hybrid assembler (v0.4.1) integrated the data from the Illumina and Oxford Nanopore to produce a complete assembly of a single chromosome. Finally, sequences of contigs were corrected via multiple rounds of mapping read data to contigs by the Burrows-Wheeler Aligner_v0.7.17³⁸.

### Genome-Based Identification and Taxonomic Classification

[0305] The 16S rRNA gene seque nce was uploaded to the EzBioCloud server to measure similarity against other sequences in database according Average Nucleotide Identity (ANI), while the all-species Living Tree Project and megablast were used to align this gene with sequences in the SILVA and NCBI databases, respectively. The whole genome sequence was aligned against other prokaryotic genomes in the NCBI database using the Microbial Genomes Atlas (MiGA) while overall genome-related index scores (OGRI) were calculated based on the tetra-nucleotide signatures from another alignment using the JSpeciesWS server and data in GenomesDB.

### Genome Functional Annotation and a Comparative Analysis of the CAZome Content

[0306] Genome annotation was performed using the Rapid Annotations using Subsystems Technology (RAST) server and rapid Prokaryotic Genome Annotation software (Prokka), followed by the generation of a genomic map in the CGView server. Orthologous genes were collected, functionally annotated, and clustered in categories using the Webmga and BlastKOALA servers, and their respected databases of Cluster of Orthologous Groups (COG) and Kyoto Encyclopedia of Genes and Genomes (KEGG)⁴⁹. The genomic sequence was scanned for its content of carbohydrate active enzymes (CAZymes) using DbCAN, with a following annotations into enzyme classes of GH, CBM, polysaccharide lyase (PL), glycoside transferase (GT), carbohydrate esterase (CE), or auxiliary activities (AA). Gene annotation was verified only when a similar annotation was identified in at least two of the three databases of HMMER, DIAMOND, or Hotpep. The DbCAN platform was used to analyze the CAZome content of the isolated Alkalihalobacillus sp. and to further compare it against bacterial CAZomes that were extracted from available genomes of some selected bacteria in the BacDive database, which are listed in Table 1.

[0307] Table 1 shows a list of the selected halophile bacteria with representative genomes in the NCBI database (including Bio-project number) that were used for CAZymes comparison. The table also indicates the following for each of the bacterial species: if reported capable of starch degradation (including reference) and whether CAZome consist of GHs or PLs. Halophile species are also indicated.

TABLE 1
A list of the selected halophile bacteria

| | | In vitro starch | | |
|---|---|---|---|---|
| | | hydrolysis | | |
| | | (with | | |
| Species: | Bio-project | reference) | Halophile | |
| Croceivirga radicis HSG9 | PRJNA358143 | − | + | Hu et al., 2017 |
| Croceivirga radicis S86 | PRJNA65289 | − | + | Hu et al., 2017 |
| Pseudoalteromonas | PRJDB4787 | − | + | Hwang et al., 2016 |
| neustonica PAMC 28425 | | | | |
| Pseudoalteromonas | PRJNA554250 | − | + | Hwang et al., 2016 |
| neustonica SM1927 | | | | |
| Pseudorhodobacter | PRJNA286976 | − | + | Lee et al., 2016 |
| PAMC27389 | | | | |
| Aureimonas altamirensis | PRJEB18307 | + | + | Jurado et al. 2006 |
| DSM21988 | | | | |
| Aureimonas altamirensis | PRJNA260421 | + | + | Jurado et al. 2006 |
| ON-56566 | | | | |
| Aequorivita sublithincola | PRJNA46631 | − | + | Lucas et al. 2012 |
| DSM14238 | | | | |
| Henriciella algicola | PRJNA381091 | − | + | Rathsack et al. 2006 |
| CCUG67844 | | | | |
| Henriciella barbarensis | PRJNA381091 | − | + | Rathsack et al. 2006 |
| CCUG66934 | | | | |
| Virgibacillus alimentarius | PRJNA238855 | + | + | Kim et al. 2011 |
| J18T | | | | |
| Virgibacillus chiguensis | PRJEB18238 | + | + | Wang et al. 2008 |
| CGMCC1.6496 | | | | |
| Bacillus subtilis | PRJNA76 | + | − | Konsula et al. 2004 |
| Bacillus cereus | PRJNA719349 | + | − | Annamalai et al. |
| | | | | 2011 |
| Bacillus licheniformis | PRJNA293170 | + | − | Saito et al. 1973 |
| Bacillus amyloliquefaciens | PRJNA73591 | + | − | Deb et al. 2013 |
| Bacillus paralicheniformis | PRJNA412146 | + | − | Božić et al. 2020 |
| Halomonas meridiana | PRJNA416452 | + | + | Coronado et al. 2000 |
| Halocella sp. SP 3-1 | PRJNA493542 | + | + | Heng et al. 2019 |
| Planococcus | PRJNA60823 | + | + | Too et al. 2017 |
| donghaensis JHIT | | | | |
| Halothermothrix | PRJNA16377 | + | + | Tan et al. 2008 |
| orenii H168 | | | | |
| Streptomyces | PRJNA189 | + | + | Samiea et al. 2012 |
| avermitilis MA-4680 | | | | |
| Halobacillus halophilus | PRJEA50647 | + | + | Amoozegar et al. 2003 |
| Bacillus sp. N1-1 | PRJNA592026 | + | + | Wang et al. 2020 |
| Alkalihalobacillus sp. | | + | + | |
| | | (current study) | | |

[0308] The selected bacteria for this comparison included six Bacillus sp. which are known for their α-amylases production (also commercial ones) and capability of starch hydrolysis. In addition to Bacillus, genomes of several halophilic bacteria were selected and included halophiles that were either reported to be capable of starch hydrolysis in vitro, or that presented genome with either GH or PL CAZymes. Finally, a map of starch metabolism by isolated Alkalihalobacillus sp. was constructed according CAZymes content using the KEGG Mapper.

### Results

### Example 1: Bacterial Isolation and Identification

[0309] The enrichment of heterotrophic-halotolerant bacteria resulted in a single bacterium that presented an activity of polylyases when cultured on an assay plate with the Ulva-polysaccharides extract while such an activity was not documented for this bacterium in similar assay plate where Ulva-polysaccharides extract was not added as a control (FIG. 1).

[0310] FIG. 2 shows alignment of the intragenomic 16S gene copies in genome using a similarity threshold of >98.65. A full identity (100%) was measured and approved the axenicity of the isolated bacterium.

[0311] The whole-genome sequence was generated by combining data from the Illumina and Nanopore sequencing platforms. Analysis of the Nanopore sequencing generated 400Mbp of which 52,900 sequence reads were of high quality with an average read length of 7,561 bp. The resulted, plasmids-free, high-quality contig was at length of 4,461,509 bp in which the mean coverage for a single read was 87.48 and G+C content was 40.4% (data not shown). The iterative polishing step against reads from Illumina sequencing revealed a nearly full identity of the aligned reads (99.89%) and their integration into a single circular chromosome that contained 4,463,966 bp with a mean coverage of 1195.9 (data not shown). Finally, the resulted full genome consisted 4,472 coding sequences (CDS) that were annotated to 90 tRNA and 27 rRNA genes, and an additional single gene of tmRNA (FIG. 3).

[0312] Phylogenetic analysis based on the whole-genomic sequence proposed the isolate as a novel bacterial strain with low identity to other available genomes. The most identical bacterial strain in the MiGA database was Bacillus sp. N1-1 CP 046564 with an ANI score of 99.18% but this score was based on coverage rate of only ˜66% between the two genomes. The phylogenetic analysis using available genomes in the JSpeciesWS database revealed low ANI scores of the isolate when compared with Alkalihalobacillus macyae DSM 16346 (77.05%), or Alteribacter populi FJAT 45347 (66.7%).

[0313] The phylogenetic analysis based on the 16S rRNA gene resulted in high identity of this gene in current isolate to that in the bacterial strain Alkalihalobacillus hwajinpoensis SW-72 (Taxonomy ID: 208199; accession No. AF541966) at a similarity level of >99.5% (FIG. 4).

### Example 2: In Vitro Growth and α-Amylase Activity

[0314] Growth of the isolated Alkalihalobacillus sp. was affected by salinity (p<0.0001) while the increase in culture salinity up to the level of 3% accompanied by greater bacterial yields and faster growth. In the salt-free cultures (0%) bacterial growth was nearly undetectable and bacterial yield, which was the lowest as compared to other cultures, remained nearly similar between 8 to 72 h post inoculation into the medium (FIG. 5A).

[0315] The highest yield was measured in cultures at salinity of 3% after 72 h and was between 1.4 and 2.8 times higher than the measured maximal yields in the cultures at other salinity levels (not including the non-saline culture; FIG. 5A). The calculated generation time from fastest to slowest was 16, 20.3, 23.7, or 24 h for cultures at respected salinity level of 3, 4, 2, or 1%.

[0316] The effect of temperature on bacterial growth was also significant (p<0001), with greatest bacterial yields and fastest growth at 30° C. At this temperature, maximal yield in the culture medium was identified after 72 h and was 1.5 or 2 times higher than in cultures at 25 or 37° C., respectively (FIG. 5C). Following the measured yields, the fastest generation time was calculated in cultures at 30° C. and was 16.3 h, as compared to 18.1 or 22 h at temperatures of 25° C. or 37° C., respectively.

[0317] No α-amylase enzymatic activity was observed in the control cultures in the absence of starch in the medium (not shown). The activity of α-amylase of Alkalihalobacillus sp. was affected by culture salinity (p<0.0001) and resulted in the fastest activity of the enzyme in cultures at salinity of 3% (FIG. 5B). The most significant increase in the activity rate of the enzyme was measured in all of the cultures during the first 4 h after inoculation of the bacterium. In cultures at salinity level of 1, 2, or 3% the activity of the enzyme continued to increase only moderately until reaching maximal rate 24 h post inoculation while at salinity of 4% the maximal activity rate of the enzyme was measured only 48 h after bacterial inoculation. In the non-saline cultures, the maximal activity of the enzyme 4 h after inoculation was followed with a continuous decrease until reaching a nearly non-detectable activity after 60 h from bacterial inoculation (FIG. 5B). The activity of α-amylase in cultures at similar salinity (3%) but different temperatures was relatively similar with the most rapid activity at 30° C. during the first 24 h of inoculation, followed by a relatively similar activity of the enzymes in the different cultures until the end of the in vitro experiment (FIG. 5D).

[0318] Table 2 shows statistical analyses of the two-way ANOVA test for the in vitro trial with Alkalihalobacillus sp. examining the effects of different factors of salinity (a, b), or temperature (c, d), as well as of culture time (a, b, c, d), on bacterial growth (a, c) or α-amylase activity (b, d). The impact of integrated factors culture time and salinity or culture time and temperature was also examined and presented under the term interaction.

TABLE 2
statistical analyses of the two-way ANOVA test for the in vitro trial with Alkalihalobacillus sp.

| | | | | | | |
|---|---|---|---|---|---|---|
| Source of Variation | % of total variation | P value | SS | DF | MS | F (DFn, DFd) |

a Optimum salinity for bacterial growth

| | | | | | | |
|---|---|---|---|---|---|---|
| Interaction | 21.78 | <0.0001 | 2.1 | 64 | 0.03281 | F (64, 170) = 942.1 |
| (time + salinity) | | | | | | |
| Time | 44.6 | <0.0001 | 4.299 | 16 | 0.2687 | F (16, 170) = 7716 |
| Salinity | 33.55 | <0.0001 | 3.234 | 4 | 0.8086 | F (4, 170) = 23219 |
| Residual | | | 0.00592 | 170 | 3.482E−05 | |

b Optimum salinity for amylase activity

| | | | | | | |
|---|---|---|---|---|---|---|
| Interaction | 20.83 | <0.0001 | 21.92 | 64 | 0.3425 | F (64, 170) = 30.18 |
| (time + salinity) | | | | | | |
| Time | 29.55 | <0.0001 | 31.09 | 16 | 1.943 | F (16, 170) = 171.2 |
| Salinity | 47.78 | <0.0001 | 50.27 | 4 | 12.57 | F (4, 170) = 1107 |
| Residual | | | 1.929 | 170 | 0.01135 | |

c Optimum temperature for bacterial growth

| | | | | | | |
|---|---|---|---|---|---|---|
| Interaction | 7.779 | <0.0001 | 0.5691 | 32 | 0.01778 | F (32, 102) = 641.0 |
| (time + temperature) | | | | | | |
| Time | 81.91 | <0.0001 | 5.992 | 16 | 0.3745 | F (16, 102) = 13499 |
| Temperature | 10.28 | <0.0001 | 0.7518 | 2 | 0.3759 | F (2, 102) = 13550 |
| Residual | | | 0.00283 | 102 | 2.774E−05 | |

d Optimum temperature for amylase activity

| | | | | | | |
|---|---|---|---|---|---|---|
| Interaction | 3.09 | <0.0001 | 1.556 | 32 | 0.04862 | F (32, 102) = 3.348 |
| (time + temperature) | | | | | | |
| Time | 88.41 | <0.0001 | 44.52 | 16 | 2.782 | F (16, 102) = 191.6 |
| Temperature | 5.556 | <0.0001 | 2.797 | 2 | 1.399 | F (2, 102) = 96.32 |
| Residual | | | 1.481 | 102 | 0.01452 | |

### Example 3: Functional Analysis of the Genome of Alkalihalobacillus Sp.

[0319] Analysis of the whole genome sequence of Alkalihalobacillus sp. through the RAST server (FIG. 6) resulted in the identification of 4598 CDSs while 1275 of them (28%) were successfully annotated into functional genes which were then clustered into 25 subsystem categories (FIG. 6). Much of the genes were clustered under the metabolism categories of amino acids and derivatives (372), carbohydrates (274), and protein metabolism (236).

[0320] COG analysis revealed 5163 CDSs, of which 3816 (74%) were successfully assigned into known protein coding gene orthologues in the KEGG server while the rest were assigned as genes of either general function or unknown (FIG. 7). 1426 CDSs were assigned as gene orthologues in the category of ‘metabolism’ which was predominated by gene orthologues of the sub-categories of amino acid transport and metabolism (270); energy production (258); and conversion carbohydrate transport and metabolism (230). 758 CDSs were assigned as gene orthologues in the category of ‘information storage and processing’ much of them under the sub-categories of translation, ribosomal structure and biogenesis (245); DNA replication, recombination and repair (238); and transcription (231). Gene orthologues that were assigned under category of ‘cellular process and signaling’ were found mostly under the sub-categories of posttranslational modification, protein turnover and chaperones (203) and cell wall/membrane/envelope biogenesis (188).

### Example 4: The CAZome of Alkalihalobacillus Sp.

[0321] Alkalihalobacillus sp. CAZome contained a pool of 94 copies of CAZymes with verified annotations (FIG. 8). CAZymes were clustered in 40 families: 19 GH families, 11 CBM, 6 GT, 3 CE, and an additional single gene of AA (Table 3). Only family GT4 was represented in the genome by the double-digit number of gene copies of 16, followed by CAZymes of another GT family of GT2, and the two families of GHs GH13, and GH32 each with a total number of 9 gene copies. The CBMs in bacterial CAZome included modules for binding of starch (3 families of CBM 20, 34, and 41; Table 3) but also for other substrates as cellulose, glycogen, peptidoglycan, chitin, inulin, levan, and xylan. GHs with an active site for these polysaccharides were also identified, with the highest number of subfamilies and gene copies for those targeting the α-glycoside/α-amylase linkage (GH13, 5 subfamilies). No β-amylases were detected. Among identified CEs, family CE4 had 6 gene copies for enzymes that catalyze de-acylation of polysaccharides.

[0322] Table 3 presents the different enzyme families in the genome following their categorization as either glycoside hydrolases (GH); glycosyltransferases (GT); carbohydrate esterases (CE); carbohydrate-binding modules (CBM), or auxiliary activity (AA). The number of copies of each enzyme family as measured in the genome of Alkalihalobacillus sp. is provided together with the functionality of enzymes of this family as identified in the CAZy database.

TABLE 3
List of the various CAZymes genes in the genome of the
here isolated bacterium Alkalihalobacillus sp.

| | Number | |
|---|---|---|
| Enzyme family | of copies | Activities in family |
| AA3_2 | 1 | Glucose-methanol-choline oxidoreductases |
| CBM13 | 1 | Cellulose-binding domain |
| CBM20 | 1 | Starch-binding |
| CBM34 | 2 | Starch-binding |
| CBM38 | 1 | The inulin-binding function and hydrolyze fructose |
| | | containing polysaccharides |
| CBM4 | 1 | Binding of xylan, β-1,3-glucan, β-1,3-1,4-glucan, β-1,6- |
| | | glucan and amorphous cellulose |
| CBM41 | 1 | Starch-binding |
| CBM48 | 4 | Glycogen-binding function |
| CBM50 | 3 | Binding of N-acetylglucosamine residues in bacterial |
| | | peptidoglycans and in chitin |
| CBM6 | 1 | Binding of amorphous cellulose and β-1,4-xylan. |
| | | Some of these modules also bind β-1,3-glucan, β-1,3-1,4- |
| | | glucan, and β-1,4-glucan |
| CBM66 | 1 | Binding of fructose but with higher affinity to inulin and |
| | | levan |
| CBM68 | 1 | Starch-binding |
| CE14 | 2 | N-acetyl-1-D-myo-inosity1-2-amino-2-deoxy-α-D- |
| | | glucopyranoside deacetylase |
| CE4 | 6 | Catalyze the de-acylation of polysaccharides, include |
| | | acetylxylan esterases, chitin deacetylases, |
| | | chitooligosaccharide deacetylases, and peptidoglycan |
| | | deacetylases |
| CE9 | 1 | Catalyze the deacetylation of N-acetylglucosamine-6- |
| | | phosphate to glucosamine-6-phosphate |
| GHI | 3 | Glycoside hydrolases in this family are β-glucosidases and |
| | | β-galactosidases |
| GH13 | 9 | Glycoside hydrolase family acting on substrates containing |
| | | α-glucoside linkages (α-amylase) |
| GH15 | 2 | Glycoside hydrolases of this family are exo-acting enzymes |
| | | that hydrolyze the non-reducing end residues of α- |
| | | glucosides |
| GH16_3 | 1 | Glycoside hydrolases of this family are active on β-1,4 or β- |
| | | 1,3 glycosidic bonds in various glucans and galactans |
| GH18 | 2 | Glycoside hydrolases of this family are both catalytically |
| | | active chitinases |
| GH2 | 2 | Glycoside hydrolases of this family are β-galactosidases, β- |
| | | glucuronidases, β-mannosidases, exo-β-glucosaminidases |
| GH23 | 3 | The glycoside hydrolases of this family are lytic |
| | | transglycosylases |
| | | (also referred to as peptidoglycan lyases) of both bacterial |
| | | and bacteriophage origin |
| GH3 | 1 | The glycoside hydrolases of this family are exo-acting β-D- |
| | | glucosidases, α-L-arabinofuranosidases, |
| | | β-D-xylopyranosidases, N-acetyl-β-D-glucosaminidases |
| | | and N-acetyl-β-D-glucosaminide phosphory lases |
| GH30 | 1 | The glycoside hydrolases of this family are β- |
| | | glucosylceramidase, β-1,6-glucanase, and β-xylosidase |
| GH31 | 1 | The glycoside hydrolases of this family are one of the two |
| | | major families |
| | | of glycoside hydrolases, along with GH13, that contain α- |
| | | glucosidases |
| GH32 | 9 | Glycoside hydrolases of this family are active on fructose |
| | | containing polysaccharides |
| GH35 | 1 | The glycoside hydrolases of this family are β-galactosidases |
| GH36 | 2 | The glycoside hydrolases of this family are α-galactosidase |
| | | and α-N-acetylgalactosaminidase |
| GH38 | 1 | The glycoside hydrolases of this family are Class II α- |
| | | mannosidases |
| GH4 | 1 | The glycoside hydrolases of this family are α-glucosidases, |
| | | α-galactosidases, α-glucuronidases, |
| | | 6-phospho-α-glucosidases, and 6-phospho-β-glucosidases |
| GH42 | 1 | The glycoside hydrolases of this family are β- |
| | | galactosidases. |
| GH52 | 1 | The glycoside hydrolases of this family are exo-β- |
| | | xylosidases |
| GH68 | 2 | The glycoside hydrolases of this family are levansucrase, β- |
| | | fructofuranosidase and inulosucrase |
| GH73 | 1 | The glycoside hydrolases of this family are enzymes cleave |
| | | the β-1,4-glycosidic linkage between N-acetylglucosaminyl |
| | | and N-acetylmuramyl (NAM) moieties in the carbohydrate |
| | | backbone of bacterial peptidoglycans |
| GT0 | 2 | These enzymes catalyse the transfer of sugar moieties from |
| | | activated donor molecules |
| | | to specific acceptor molecules and forming glycosidic |
| | | bonds |
| GT2 | 9 | Proteins in this entry contain glycosyl transferase family 2 |
| | | domains which are responsible, |
| | | generally, for the transfer of nucleotide-diphosphate sugars |
| | | to substrates such as polysaccharides and lipids |
| GT28 | 1 | Glycosyltransferase with a number of known activities; 1,2- |
| | | diacylglycerol 3-beta-galactosyltransferase; |
| | | 1,2-diacylglycerol 3-beta-glucosyltransferase; beta-N- |
| | | acetylglucosamine transferase |
| GT4 | 16 | Sucrose synthase bacterial phospho-N-acetylmuramoyl- |
| | | pentapeptide-transferases, |
| | | which catalyse the first step of the lipid cycle reactions in |
| | | the biosynthesis of cell wall peptidoglycan |
| GT5 | 1 | This enzyme involved in the pathway starch biosynthesis, |
| | | which is part of glycan biosynthesis |
| GT51 | 5 | Murein polymerase enzyme utilise MurNAc-GlcNAc-P-P- |
| | | lipid II as the sugar donor |

### Example 5: Comparison of the CAZome of Alkalihalobacillus Sp. To Other Selected Bacteria

[0323] A comparative analysis of the CAZomes of Alkalihalobacillus sp. isolate and other selected bacteria revealed a total number of 224 CAZymes with 140 GHs, 25 GTs, 21 PLs, 21 CBMs, 10 CEs, and 7 AAs (Table 3) (FIGS. 9A and 9B). The CAZome of halophilic bacterium Streptomyces avermitilis MA-4860 was richest and contained 105 CAZymes, followed by the two strains of halophile Croceivirga radicis that consisted of 68 or 67 CAZymes. S. avermitilis MA-4860 also presented 38 unique CAZymes, many of them in numerous copies (>5). The poorest CAZome was in bacterium Virgibacillus alimentarius J18T and contained only 11 CAZymes. Among the commercially important Bacillus, B. paralicheniformis and B. cereus were richest (66) or poorest (34) in CAZymes, respectively. Only CAZymes GT28 and GT51 were present in all examined bacteria, while GTs 2 and 4 were missing only in Pseudoalteromonas neustonica (SM1927). GH23 was also present in nearly all bacteria excluding Halothermothrix orenii H168, while GH3 was not found in Bacillus cereus and Virgibacillus Alimentarius J186.

[0324] The CAZome of isolated Alkalihalobacillus sp. was most similar to that in the halophile Bacillus sp. N1-1 (FIG. 10) and shared a pool of 36 CAZyme sub-families. 21 of these were GHs, 6 CBMs, 5 GTs, 3 CEs, and 1 AA. Differences between these bacteria included a single GH4 gene in the CAZome of Alkalihalobacillus sp. and 3 unique GHs of 140, 170, and 171 in Bacillus sp. N1-1. The CAZyme families GH13 and GH43 were richest in terms of their content of genes from different subfamilies, with 26 and 15 subfamilies, respectively. Despite this richness in family GH43, 8 of the compared microbes lack GH43 genes while B. paralicheniformis and S. avermitilis each contained 8 CAZymes of this family. A closer examination of the α-amylases (GH13) revealed that only Aequorivita sublithincola DSM 14238 lack CAZymes of this family and Henriciella algicola CCUG67844, Henriciella barbarensis CCUG66934, and Virgibacillus alimentarius J18T had only a single copy of GH13 each. In contrast, S. avermitilis MA-4860 was also richest in α-amylases with 9 GH13 subfamilies, 2 of them unique to this bacterium. The most common GH13 CAZyme was GH13_31 of oligo 1,6-glucosidase, found in 12 of the examined bacteria. The isolated Alkalihalobacillus sp. and Bacillus sp. N1-1 were identical in their α-amylase content, each of these CAZymes appearing in an identical number of copies (FIG. 10). The GH13 CAZome of these two bacteria consisted of a relatively unique set of two α-amylases, GH13_14 and 18, as both together were found only in Halocella sp. SP 3-1.

### Example 6: Starch and Sucrose Metabolism by Alkalihalobacillus Sp. Following CAZome Content

[0325] Alkalihalobacillus sp. CAZome revealed two catabolic pathways for degradation of the starch substrate (FIG. 11).

[0326] In the first pathway, glycogen phosphorylase (GH13_18, EC:2.4.1.1) break the linear chains in the glycogen substrate by phosphorolytic cleavages of the α-1,4-glucosidic bonds into α-D-glucose-1-phosphate oligo or mono-saccharides. In the following step, UTP-glucose-1-phosphate uridylyltransferase (GH13_29, EC:2.7.7.9) phosphorylate the α-D-glucose-1-phosphate to form another activated form of nucleotide glucose of a UDP-glucose, which is further utilized into metabolic cycles of amino sugars and nucleotide sugars.

[0327] The second metabolic pathway involve hydrolysis of starch into dextrin and maltose and their further conversion into D-glucose/dextrose units. The hydrolysis of starch is initiated by the attack of the α-1,4 glycoside bonds by α-amylase of either glucan (GH13_5, EC:3.2.1.1) or glucan 1,4-alpha-maltohydrolase (GH13_14, EC3.2.1.133). In both cases, the hydrolysis of the starch substrate results in the formation of dextrin polymer that is made of D-glucose units and maltose disaccharide made of glucose units. The dextrin polymer is further hydrolyzed into the D-glucose units by oligo-1,6-glucosidase (GH13_31, EC:3.2.1.10) which hydrolyze α-1,6 linkage in the polymer. In the alternative pathway through maltose, this substrate is hydrolyzed into D-glucose by maltose phosphorylase (GH31, EC:2.4.1.8).

1. A marine-derived halotolerant bacterium capable of hydrolyzing at least one carbohydrate.

2. A microbial consortium comprising at least one marine-derived halotolerant bacterium of claim 1 or any isolate, mutant, spores, enzymes or extracts thereof and/or a conditioned culture medium of the at least one bacterium and/or secreted compounds from the at least one bacterium.

3. The bacterium of claim 1, wherein said bacterium is present at a low abundance in intestine of a marine urchin.

4. The bacterium of claim 3, wherein said bacterium is present in Tripneustes gratilla elatensis.

5. The bacterium of claim 1, wherein said bacterium is capable of (i) growing in a solution comprising about 3% saline, (ii) growing at 30° C. or (iii) growing at 30° C. in a solution comprising about 3% saline.

6.-7. (canceled)

8. The bacterium of claim 1, wherein the carbohydrate is (A) a polysaccharide, optionally wherein said polysaccharide is at least one of (i) cellulose, (ii) starch, (iii) glycogen or (iv) any combination thereof, (B) at least one of amylose and amylopectin, (C) from an algal source, (D) an algal polysaccharide, (E) an algal extract, (F) an algal biomass, or (G) one or more of carrageenan, agar, cellulose, alginate, laminarin, fucoidan, ulvan, chitin, starch, xylan, rhamnan sulfate, chrysolaminarin, or any combination thereof.

9.-15. (canceled)

16. The bacterium of claim 1, wherein said bacterium expresses genes capable of metabolizing (i) amino acid and derivatives, (ii) carbohydrate, (iii) protein metabolism or (iv) a combination thereof.

17. The bacterium of claim 1, wherein said bacterium (A) express gene copies of at least one carbohydrate active enzyme (CAZome), optionally wherein said bacterium comprises at least 80 gene copies, optionally at least 90 gene copies of CAZymes, (B) contain at least one carbohydrate active enzyme (CAZome), or (C) produces at least one carbohydrate active enzyme (CAZome).

18.-20. (canceled)

21. The bacterium of claim 17, wherein said CAZome comprise at least one glycoside hydrolase (GH) enzyme, at least one glycosyltransferase (GT) enzyme, at least one polysaccharide lyases (PLs) enzyme, at least one carbohydrate esterases (CEs) enzyme, at least one carbohydrate-binding modules (CBM) enzyme, at least one auxiliary activities (AAs) enzyme or any combination thereof.

22. The bacterium of claim 21, wherein the at least one bacterium contains gene copies of at least one CE enzyme, at least one CBM enzyme, at least one AA enzyme, at least one PL enzyme, at least one GT enzyme, or at least one GH enzyme.

23.-26. (canceled)

27. The bacterium of claim 22, wherein the at least one GT enzyme is at least one of (i) GT4, (ii) GT2, (iii) a combination thereof, optionally (a) wherein said bacterium contain at least 12 GT4 gene copies, optionally at least 15 GT4 gene copies or (b) wherein said bacterium contain at least 5 GT2 gene copies, optionally at least 8 GT2 gene copies.

28.-30. (canceled)

31. The bacterium of claim 27, wherein said GH enzyme is GH4 or at least one of (i) GH13, (ii) GH32, (iii) GH31, (iv) GH16 or (v) a combination thereof.

32. (canceled)

33. The bacterium of claim 31, wherein said bacterium contain at least 6 GH13 gene copies, optionally at least 8 GH13 gene copies, optionally wherein the GH13 is at least one of GH13_31, GH13_29, GH13_18, GH13_14, GH13_5 or a combination thereof.

34. (canceled)

35. The bacterium of claim 31, wherein said bacterium contain at least 6 GH32 gene copies, optionally at least 8 GH32 gene copies.

36. The bacterium of claim 1, wherein said bacterium contain at least one enzyme listed in Table 3.

37. The bacterium of claim 1, wherein said bacterium is capable of hydrolyzing a carbohydrate into at least one of (i) amino sugars and nucleotide sugars, (ii) D-glucose, (iii) D-glucose-6P or (iv) combination thereof.

38. The bacterium of claim 1, wherein said bacterium has at least 85% identity with SEQ ID NO:1, from the genus Alkalihalobacillus; has at least 85% identity with SEQ ID NO:2; or has a sequence as provided in SEQ ID NO:2.

39.-41. (canceled)

42. A bacterial culture comprising a biomass composition and a bacterium of claim 1, optionally wherein said biomass is an algal biomass.

43. (canceled)

44. A method of hydrolyzing carbohydrate, the method comprising contacting a biomass, biomass derivatives or compositions comprising biomass or any derivative thereof with a bacterium of claim 1 with a biomass, optionally wherein said biomass is an algal biomass or any extract thereof.

45. (canceled)

46. A method of production of bioenergy products or metabolites comprising contacting a biomass or biomass derivatives with the bacterium of claim 1, optionally wherein the biomass is an organic matter or an algal biomass.

47.-50. (canceled)

The application's sequence listing, which the Patent Office published only in electronic form, follows.

SEQUENCE LISTING (11 sequences)

SEQ ID NO: 1 - DNA, 1507 bp, Alkalihalobacillus sp.
  source 1..1507: mol_type = unassigned DNA; note = Alkalihalobacillus hwajinpoensis SW-72
gacgaacgctggcggcgtgcctaatacatgcaagtcgagcggagatttgggagcttgctcccaaatcttagcggcggacgggtgagtaacacgtgggcaacctgccctgcagactgggataactccgggaaaccggagctaataccgggtaatacatcgcaccgcatggtgcaatgttgaaagttggctttcgagctaacactgcaggatgggcccgcggcgcattagctagttggtaaggtaatggcttaccaaggcgacgatgcgtagccgacctgagagggtgatcggccacactgggactgagacacggcccagactcctacgggaggcagcagtagggaatcttccgcaatggacgaaagtctgacggagcaacgccgcgtgagtgacgaaggccttcgggtcgtaaagctctgttgttagggaagaacaagtaccgttcgaatagggcggtaccttgacggtacctaaccagaaagccacggctaactacgtgccagcagccgcggtaatacgtaggtggcaagcgttgtccggaattattgggcgtaaagcgcgcgcaggcggtcttttaagtctgatgtgaaagcccacggctcaaccgtggagggtcattggaaactggaggacttgagtgcagaagaggagagtggaattccacgtgtagcggtgaaatgcgtagatatgtggaggaacaccagtggcgaaggcggctctctggtctgtaactgacgctgaggcgcgaaagcgtggggagcaaacaggattagataccctggtagtccacgccgtaaacgatgagtgctaggtgttggggggttccaccctcagtgctgaagttaacacattaagcactccgcctggggagtacgaccgcaaggttgaaactcaaaggaattgacgggggcccgcacaagcagtggagcatgtggtttaattcgaagcaacgcgaagaaccttaccaggtcttgacatcctctgacaatcctggagacaggacgttccccttcgggggacagagtgacaggtggtgcatggttgtcgtcagctcgtgtcgtgagatgttgggttaagtcccgcaacgagcgcaacccttgatcttagttgccagcattcagttgggcactctaaggtgactgccggtgacaaaccggaggaaggtggggatgacgtcaaatcatcatgccccttatgacctgggctacacacgtgctacaatggacggtacaaagggcagcaacaccgcgaggtgaagcgaatcccataaagccgttctcagttcggattgcaggctgcaactcgcctgcatgaagccggaattgctagtaatcgcggatcagcatgccgcggtgaatacgttcccgggccttgtacacaccgcccgtcacaccacgagagtttgtaacacccgaagtcggtggggtaacctttatggagccagccgccgaaggtgggacaaatgattggggtgaagtcgtaacaaggtagccgtatcggaaggtgc

SEQ ID NO: 2 - DNA, 4463966 bp, unidentified (residues 1-1,487,989 of 4,463,966)
  source 1..4463966: mol_type = genomic DNA; note = Genomic DNA of Bacterium
attaccgcctcatgtttgattttgtgaccaatcatatgtcgaaatcgagtgaatggttccagaagtatttaaaggaagatccggagtataagaattatttcattccgaaggacgatgcgttcgatacgtctcaggtagttcgtccgcgaacttcgcccctttttcatgaatataaaggaggcaaaacggcctggacaacgtttagtgaagatcaggtcgatgtaaacttcaagcattttccggctttacttgagatgacgaatattctcttagaatacgcctaccgtggcggcacaagcattaggcttgatgcgatcggctttatgtggaaggaatctggcacaacgtgtatccacttgccacaaacgcacgcaatcattcaactatggcgagaaattttagaagagctgaagttaaacacgctgctgattacggaaacaaatgtgcctcatcaggagaacataagctattttggcgatggagagaacgaggcgcatatggtgtatcaattttctctaccgccgctcgtcctacacacgctatcgacccacaacacaagaacgctgacggattgggcaaaaacaatcgataaagtctcagacaaagcgacttatttcaacttccttgccagtcacgatggcatcggcatgcgcccaaccgaggggattttaacggaaacagaaagaaacgttcttgcggataaggtgattgagaatggtggacgggtttcgtacaaaagcaacccggatggcacccaatcgccatatgaactcaacatcaactacatggacgcactggtcaatccggaagaaacagaggaagatacgaaggttcaaaaaatgcttgccgctcactcgattttgttctcggtcatgggcgtaccagcgatttattatcattctctactaggatcagaaaatgatcaagaaggtctcgaaaactctggcatcaatcgacgaatcaaccgtgagaagttccagtacgacgagcttgtaaaggaactggaatcttcctcaagacgaaagaacgtgtttcatggactgaaaaagttaatccgtactcgccagaaggagtccgctttttctcctttcgctgatcaggaaatcatgccaatcaatgaacaggttttttcgttgattcgtagaaataatgaaacagaggaatcgattcttttcatcgtaaatgcatgtaacgaagaagtcgacgtcgaccttccatacggtgggcacgatctaatcagtgaagaattggttgaacaacatgttacactagcgccatatcaatttatgtggatcaaacgataaagtaggtgaagtctttgaaaatcatcatcgcacccgattcatttaaagaaagtctatccgcgcctgaagtttgtgatgcggttgaagctggttttcggaaggtgttcccgcaagcgacttatacacatcttccgatcggagacggaggtgaagggacagttcaatctgtggtcgatgcgacagatggcaagctcgtcacccttaccgtcaacggtccgctaggcaataacgttgatgctttctatggcctaacgggggatggaaagaccgcgataatagaaatggcagcggcttctggactgcatcttgttccgcgtgatcagcgcaatccactgatcacctcaacgtacggaaccggtcagctcattaaaaatgcgctagaccaaggtgtggtgcgtatcgtgctaggtctcggcggatcggcaacaaatgacggtggagcagggatggcgcaggcgctcggtgcgaaactattcgatagaaacaacgaccaacttccaccgggtggacaagccctgagtgagctcgtatcgattgacgtttcaaatctggatccgcgattaaagaccgttcaaatcgaggcagcgtgcgatgtgacgaaccctttaacaggatcatcaggggcatcagccgtgttcggcccgcaaaaaggcgcaaccaaagaaatggttgatgagcttgatcacagcctggcacgctatgctgaagttatcaaaaaggatctcggaaaagcggttacgcacatcagcggtgccggagctgcaggcggtctcggcgcagcgatcgtggcctttttagaaggagagctccggagcgggattgatcttgtgctcgatgtgattcagtttgaagactgcatcagtggagcggaccttctcctaacaggcgaaggccggatcgactcgcaaacgattcatggaaaagccccagtcggtgttgcgcaacgagcgaaagctttgaacaatcatctcccggtaatcgcgatcgctggtagtttgggagaaggatatgaagctgtcttcgatcatggcattgatgctgtttttagtgtggtaaatagtgtggttacgctagaagaggcattggaaaaaggggctgtgaatgtggagaagacgcttgagaatattgggcggttggtgaaggtttgtcggatgatagagatgtaagaataagggccggtgtttgtcttcgaaagtggaggcaggtgccggttttatttgtggagggaggatgcgggaggggagcgggggctcgtgggattagaatgattctcgttagctaataaaaaggggttttcgctaataaatcttgtttttggccaataaaaatggagtttagccaatatagtagagatttggccaatataaggggaggatgagcacgttattagcatgctctgactcagtaatcacagggtttctcctgacactcttcctttatttccggaaatccttcacctaacccaatccttcctactgaaaaatcgttttcgatcccagcggaaaactcaacttctccaccattaatcgtaccatccacgttcaatccacccatttcactttgatagacatgagtgaattcaacagaatcgaggtgctcgtaatgttcctaaggaaactttcaacagctttcttagcttttgtttttgtttcatcgtcatactcctcacttgctgtcatccagctacagcctgctaaaaggagaaggagtgagccaagcaaaatgattcggtttttcatagagtcacctcatagccatttttagtaatcacaaactctttattcacatccctttttccgaggtggaaaattttcgcttcggatggctaacccggcgactttaaaatcttcttcgaggttaatggtgaattcctcaccctgatccaccttaccatcaatcgccatgccgctcatttcattttggtagggggcgtctaatgtgatctcttctattaaaaagttgttcaccatatagctttctgctgcttctgttgctttttggatagtctaatcatcatacgtttctacctggcatccgctaaataggattaccaaggcgaggaaagcacctctataggacttcattacatttcacctcatatctagtcagggttcatatgaacacgtgcgctccatacagtcctcttttcgatccggaaatgtctcgcttacaccaacacttccaaccgaaaaatcattctcaattcctgcagaaaaagtaccctcgccgttattcaccgatccttctaccgtcatgccgcccatttcattttggtagacggttgtgatttcaacggataggacttctttaaagttgctctcgatgtaattttgtgtggaagcctccgctttagcgatggttttatcatcatacgtttcgcttgaggagggtgaattacacgctgctacgacagataaaataaggagaacgatgaaaaatcgttttaacaaaaaaatcacctctgaattaataagaaagtagaatcattagctctcacattattcttcctgctgtccatagtcgcacgagtgctctcggcattcttctttccgctcaggaaatccctcgcccattccaatactcccaacagtgtaatcatcatgtaccccaatattaaaagttgcttccccattgaccgttccttctaaaacgaggccacccattggagcagaaggggagttgttaaattctacgctttcaatgttttgaaagttagcaatcaaataacgctccacgctcgcttccgctttgtcgatttgttctggatcctgctccacaccacacccgattagaagcgtaaacgataagaaaaagacaagtcttttcatccattattctccttactataaaatgctaggaatctcttattcgtaatcacaaaccgtatgacggcatccttcctttatatcaggaaagccttccgtttcacctacacttttaaccatgaacgtttccggatccacgctcgctgaaaattcagcgccattgaccgttccgtttattattaaaccttccattggatcactcgtatcctcgatgaacgtaattttatccgcgtttttataattatggcggaaataactttcaacgtgttctcttgctttttcaatggtttgtttatcgaacgtttctgttgatgaagtggcgttgcatcctaatataaagactaaaaggaagacggcggcagtacttttcaaaaaaacacctcactgtttaagaacttaatcacaacttagtaatcacaaactttctccttacactctgctttatcttcaggaaaacccgccgcttcgctgatcgcgatcacgtttaacgagttgtccatgtccattgagaacgcagcttctccatttacatttcctcgaatcacaagcccacccattggactactatgatcgtcactaaaagttacctcatcaatgttttcataattcgctcatataaaactttccgcttccttctcagcttgtaaaatgaattcttccgagtactcattactaccagtagagaaaaaactacacccgttgaggagaagggcgataatgataaaaattggtgctttccattgcatgatggtcacctcttgtgaactgtggttagatgttgccccgccactgttagaatcattctagttagccaataaaatgaggatttggccaatacatctcgagtttagccaataaaaaggcagaatggccaatataatcggattttagtcaataaagatggcgacactcgtaatagtagatgggattgataaagaaggcgcctgttttcagttagtaatcacacgttttttcgatacattcctgcttacgttcagggaattcctcaccttttccaatgcttccaaccgaaaagtcattttccatttcgacgtcgatcgaaaaggttgctttctcattgccatttacgattccagagatcatcaatccgcccatcggactagttgtgtccttatcaaactcgacctgatcaatatccctataattatgaattaagtagctttcagctatatctcttgctttcgagatcgtttcttcgttgtactctcctgatgagttttggctacagcctacgagtataagggatacaatcaagagaattagccttctattcaaaatgaatctttcctttcttcacacgtttctaacaaactttctttttacattcgtcgtcttttaactctagaaataacttgtcgatgcttttcagttgaatcatttcctcacatttttaatttgctgtctttccaggttcggtcactcacaaatctgttctttacacgcttctttcatatctcctggagctaaatgcccaatcgaaaaatcacttcgaaccccagctgtaaattcagccgacccgtcattaaccgttccttcaatcgttaaaccacccatttcactttcataggacctggttatctcaaccgattcgatttcttcatagttatgtagtataaaacgttcaaccgatttctttgctttgtcgattgtttcctcatcagaatcgtttccctgtgagaaaaacccgcaagtccctaatagaatggagagggtgaggaataaaaataatcgtttataaaagggaatcacctcattttgattcacgttttaaatagatcgatagagatgaaaaacgctgaatctaattataccaaataaaggtagaggatgaagagatcgtttgagacgcttaagacggagtaaacgaaacagagaaaagccgtttctgagtcttcatcttgctacaatgaaaacttccacaaggaatttttgaaatgaagtaaattcctcttaacattagctgattaagcggaggaagaggttttcatgagagatggttgatttgctagtttcattacgttgaaaagcatgtttcgtatatggggtaaagtggtagttaaaatagaaagttacaatatttggatggtgtgaggatagaaaaatttcgaagggggtaaacatgtcttttggtaagaggttccttattacatggttgattgtaatggtattaatgagtattgagtatgtatttttgcctgatcatgtcattataaagggtcttgcactaggtttaacaaccatgacagttgcgaccgtcttgaacaaactgtatcccacaaaagaaaaaacgaaataatcgtacattcataaccaggtaagatcattcttcagctaaacaaataaaaaccatacacatctcaagtagagatctgtatggtttaaaatggttcatgtttaataatcacatattttttcttcacagcccttttttctaggaggaaaatttttactgcgaatcgctaaaccatcaactgtaaagtcttcatttatattgattgtaaactcctcttcattattaacggtaccatcaattgccatgccacccatttctgtttggtaaggttcttctaaagaaacattttcaattgagaagttgtttcttatgtagctttcagcagtagtgagagcttctttggtagtggcttcatcgtaggtttcattattatcgttcacattacatcctcctaatagtataataattccaatggaaattattccgattattctcaatgatactcacctcatttcaggaattaagggggttacttatgaatgctagtttgattgataaatctgcaatgcgtatatctgaagatacatataatgatgggttagaagtggtagaagtcaacataaatgataatcaaatagaatcatggcacgttatagatgaaattcaaaacgatgagactggtctctttgggtatgtacttaaaaatcctatttcagagcaaatcgtcatcagttttcgtggcacagaaatgcctacttcagtgacaaccgaagttaagtctaagtatgtcgggtctccttcacaagatgcgatgttagcaaccggtgaagcaagtatcgaaaatggaaatctcgtatatgagaaaaatacgatcagtaaagcagaacttgttgaatcaaataaagatatcaaagaagacctcgaaggcatcgttttaggcaattccaattataccaaaaagaggtatgggacaacagcttatttaggaaccccttctcaggatgcaagtctagcaagtggtcgagctgaactggatgcaaaagctggcactatttcatatgttcacgaaaaccagtttaccgaagcaaaacaaaaagtagaccattatgtgaagaagttcggcgcaaagaatattacgtttgttggtcattcacttggtggggggttagcgcagtattttgcggtcaattatgattcgaatgccgtaacgtttgcagctgcagatatttattcattgttaacgcccgagcaacaacaaagagccatcaatggagagtacaaagacaatgtaattagttatacatatcccgatgatatggttggaacttattataaagagtctgtaggctcggtttattacatgggagaccctgctgatagtagcatgccctggcttgaaacacatggaattaaaaattatcgttctgatggtatgtacaatgatgaaggatattttcttccagaatctcttttcgacgaaagctttcaaagtcaactcaacctatccccactcgcactgaaaaacagcggtgtttctgacttccatattcaaattcaagaagccttaatggaaatgtatgtacaagaaatgaagcagagcgaggagcaaattgaagcaacgaaacaggcgctgctcgaattccttgatgtgtacataaacacgatgcgcgacatgaaaagcaaatacatcaattcggtaggaagcgggcaatttgataagttaaatgcatcagacgtggagagctactttcacgagtttacaaaagcgccagttgatggtgtgccgatgttatttgatatccagatgttcgatagcttaatggcatcacttggtgatactcatcaggatacagcggatatcgcttataacatggagcgaatgagtcaagacttaatgcgagccgatcaatttctcgcgcagtggctacggtacgaatcataatgagaggaaggtgaaggaatggactttgatttcgattggtggaacgattactgggaaaggcagcggcaaaaggatgctttaagaacgcagattaaaagtgatctagaagcggaagcgaatctattaaacactcatttagaacattgctacgcggtcggttcgcttagtgaacgccacaaagggatcctcaaccagattgaacataactttgatggtcaggcgaataaggcgctggtgcagcggtttgaagagaatgagttgaagttaattaagatgaaaatgatgtatgaaatgttgcatgacagtattagggttaggtgagggacgtctctggatagggaacgtccttttatttttgcttttcgtaggttagtagtgtaagaagcgtattgtacacacggtgaaaaggtaggttatatggatttaaacctctaaaggtgcaattgaatggagagctagctttttaacaggtgaattaaaactacaaattgttagcaacacgccccccatttcacttatttctctgaaattaagagcatttcaatgttttgaagtgttggaaaaagaaagagaggaaaagctaacttcgaaagacggaagttagctttttatgtatcatttgtggaaaaggtatttttggataaatttaattcaaatgaacgatttcggagcggtcagcgtcatatagatgcaggtaaaggagagggttgtatggaacgcgaggaggagattcaattaattctgcaggcacaaggcggagacgatcatgcgttcactcagctttttcagtgctattatgctttcctctacaaatatcttttaaagctaaccttaaatgaagagactagcgtggatcttgctcaggaaaccatgatgaagtgttatgtgaaactttcttcttataaaggagatgggaagttctcgacgtggatgatttcgatcgcttctaggctttacattgacatgcttcggaaagaaaaacgagaaaagaaatgggttgatgaagagaagcgtaccttatcgcgaaagctagcgtgggactcgagtacaaaaggaatgaattggagcgatcttttcacagattttaatacgttagactccacgctgagagttccgatcttgttacggcattattatggctactcttatgatgaaattgggaaaatgctcgggatacgtacagggacagtgaaatccagggtgcatacaggtttacggaagttacgaaaggagttggatacgccgtgaaggaagaagaaaagatcgttcaacacctcaagcaggattggcagcatatcgatgatcttggaaaagaatcactttctcagattgatatggagaagcaactagtactgtttcaacaaaaaaagaaaaaagcgttttacatcgaaagtgcgctctttttgttaacagcgttcgtaatcttaaccgtagttatgataagtcttttcgaagctccactattctttttgtacttccagatcgttgcaagcctgattgctccttttgctgtttattttacctataagaaagtgaataagaaaggaatgttcggccatgacaaaccttgagctctacgtctttgttcccattcttattctcttgttactaacgcaaagtatgcttctctttgtagatgcaaagaaaaaagggagttacccatggctatgggggatctggggattgattcaattaccgatgccaacgttattttacttgctgttcgtcgtttggccatataaacgaaggctaaaggggaagaggtgaaaaaatggaaatcttgaacgatataaactgggcgttagttgcgccgttgctgattttgcaggggatcttaaccatttcagcacttgtcagctgtatcaaacaaaaggaaacaaacggaccaaaatggatgtggatccttcttattctctttgtgaatctatttggggcaattctttactttgtgatcggacgtaaaaacagttaggacggtgggaaacatgcttgttaaaatcgacaaactatcgaaacagtttaaaggtaaaaaagctgtctcgaatctctccttcaccattcaggagggaagctgcatggcactattaggtcctaatggtgctggcaaaactacgacgttgcaaatgttagctcgaatgctcacacctgactcgggatccatacaatttaagggatatcaaaacaaagactatcggccattgattggcttcttacctcagcatccatccttttttaattggatgacagccaaagagtttctttctttcgccggtaagctatcatcgataccaaagtcagagcttcataatcgcgtagaggaggtgctaacgttcgttagcttagaagaagcaatgactaaaaaaatcggtggcttttctgggggaatgaaacagcgcctcgggttagcgcaggccttgcttcacaaaccgaagcttctcattctagacgaaccggtatctgcgctcgatccaaaaggaagacgagactttttacaactgatcgaagtactgaaacagaacatgacggttctattttcgacccatatcttacacgatgcagagcaaatttgcgatgaagtccttattctgcaagatggctgtttaaagtggaaaggggcattaccttctttacgtaaagaatttgatctattgccaattaaattacaaaccgaagaaccgatgaacggaatcatcgaacagcttgaaatcattgaagcttatgaatacattgatcttaaaacagtaaaggtgagacttcctgagcatgttcacccaaatgagctgttacaggagctcattaaccggaatagagcagtaactcactttgaaatgatgcatgattcattagaagatgcttatatgaaggttgtgagacaatgaaccggtttctaacgctactacacaaagaaattatcgagctaatgcggaatggcaaatggatctggcttccggttgtactgatgattatcggcatctcgcaacccttaacaagttactacatgccacaaattctcgatatggcgggtaatctaccagaaggagctagtatcacgatcccgacacctacgggtgaagaagtattgagcggtgccctgtctcaatatggcacgattggtacccttctattcgttctcgcaaccatgaatgtgattgctcaggaacgacaaaacggctccattacgcttgttatggtgagacacgttaacgagtggcaatacttaggcagtaaaactgtggcccagcttgccctcttgttcttatcactcctattaagctactgcctcacttggtattatacaaatttattgtttacttcagtagactggaagctcatggtgagcagtctagtcatttactgcttctgggttctcttcgtcgtctccgttacgatttttgtcggaacaatcatccagcataatggaggaatagccggtgtcagtattctcttcctctcgctgatcagcctgctaacgtcactacttccgaaattcatggactggagcccaggaaacatacgaggagaagcgacgaaggttttagtcgaacaacaatggacccaatcagcttgggttgtcatcggtagcacgacgatcttatcactattgctatttattgcaggcgtattggtattaaagaggtataagtactatagaagtgttggatagaaaatcaatatgagaaatgccctcctggaacgcctgaaccaggagggcttcttgcgggagaaagatattaaactaaagggtcattttcctattgaatcgtgcattttcattcaataatcctttcgattaacttatagcaatagtaagataaaagaaagggtgtaaaaaaatagaaagctgaaaggtagtatcgaaaaattgaatccaaaaatataggcatcttacatatggaagcaattatttgggagggttaaaatggcaatcgctacttattcaaaatttactagcttcaaagaatcgattcactccctaacagatcctgctgatcgggaagaagtaatgaacgaaactttcttacttgaacgagacgagaaaaagaacttggaaatgtattatgccccgtttgaacacgtaaatgaacatgcaaaaatcgtgattgtcggaattacgcctggacttcatcagatgaaaaaatcatttgaaacggtttggaataataaacatgaagaaattggagatgaagaggttttacaaaaggtgaagaatcattccagtttcgaaggtccaatgaggaaaaatttgattacgatgttagatgaattggaactacatcaatacttaaacctggactctacaagtgagctgtttggttccgccagtcatctcgtccaaacgacttctgttctgccttatccggtattctgtaaaggaaagaactttagtggctccaccccaaacatattaaaaacggaagtgctgcatcgatacgccttgaaccatctaccaatcgagttagagaaattaaacgatccattaatcgtgcctttaggtgtcaatgtaacaaaagtactgatgcatctagctaaaagtaacttgatttcaacaaactccatcgtgaacggatttccacatccttctggaggaaatggccatcgacatcgtcagtttgcagagaataaagaggaaatgaaggaaacgattcgaaggtattttagctaagatagaatgcttcttttagcataatagccagaatgtaagatagagggattacatatttagtatttctagtgaagaaggaaagtacgtaacaatacaggatttcttgaaagatgtacctttagaaaagagtggctcgaacgtaacacttaatgaaatagaagagatatggagtgaagctcattgattatctatgaagctatgaaaagtgaatttcttcaagacgtcctgaatgacacgctggtcaataacatatgcaacctaagcgggaatttaaagaagagttatggccggttgatacttaaagcatagggtgctgtaaaaaggtcctgtgcttttttgtgataaagtattttttaagctttattaaaaaacatccgctatctgtcaaactatggaagagaaaagaataaataacaactgcttttcttagaaaaaattaattttgtatatcttatctattacttttacttaaaattaaaaatctagataggaaattagatctaaggaatgattactatgaccaacaaacaaggcacacacgaagaactaaaacgaatcaacaaacactacccaactaatctaaaacaatccccattactaccagtcgaatacacagaagccttatccatcagagtgctctcgcaattggtcagaaattcgagagcttattagaaggcgggaacttagatgaggcgattgcatttactcatcaagttctccagcttgttggacatgaaagtgatgattttaccttaccattatcaaacattctctatcgctatgataaccaagaaatccctgagctagaaaaccaatacttatcttcaatagaattaatctcaaacgaaaagcagaagatgaaaaacctatttaaatcattaaaatttgaaatgctaacagctgattcggtgtcctttatggtgagcttcattcgcatgtctggcttacagctgctgattcgaccattaacagaattgcatcaacgtgggataaaggtgaggatattaacctcattgtatatgaacgttacggaagcaaaggcattacgcaagctgcttgagttttcgaatgtagaagtacgcatatttgattctgggagagagtcatttcatacaaaagcttacttgtttgaacgtgcttctggattacatacgggaatcattggttcatccaatttatcacatgctgccttgattaatgggcatgaatggaatgtgaaggttccggattctagctatttaccaatctataaacaggcgatggaaaagtttcagaaggcatgggatgataagaggtcacacgtattaacagaggaattgcttgaacggtatgagcagcatttagatgaaaaggaaaaggaaacgaagccagtcatcctgccgtcgttccaaatttcacaagtggcagaaagtaacgtctcttactcacctcatcctgacattgaaccaaatgaaatgcagaagaaggcgttacaagctctaaagcaaacacgagagaatggcaatcgtaaaggtgttgtgattgcagcaacaggaacgggaaaaacctatttgtctgcctttgatgtttttgaagtgaatcctaagcgcatgctttttctcgcacatcgggaagaactgctcgacaacgcgaaggaaacttttgaaaaggtgtttaacaacagtcatttatgtgggaagttaactggaaaagaaaaagacatacataaaccgtttttatttagtaccgttcagtcgatacactctgatcagtcgcttcatcagtttcatccgaatgaatttgattatattatcgtcgatgaatttcatcatgctgaggcaccaacctatttgaagatccttcactattttgaaccaacctttttgctagggttaacagcaactcctgaacgaatggatggtcgggatgtgctggcactttgtgattacaatgtagtgtatgaaatacgattacgcgatgctcttgaagcggaattactggcaccgtttcattactttgggttagctgatgatacggtggattacaatgaaataggattgcgaaatggtttattagatgaacgccaacttgtaaaagcgctaaagacaaatgagcgtgtcgattatgtccatgagatgatcaagcgttatgggtttgatggggagcagcttattggattaggcttctgtgcaacgattgagcatgcgatgtttatgagcgaatcgtttaaccgtttaggctatgtgactacggtgctcacaggaaatgattctcctgagtatagaagtcaggtcattcagcggcttgaagatagcgaagatccgctgcaaatgattttctcggtgaatatttttaatgagggaatagatattcctcgtctcaatctgatcttatttctaagaccaactgaatccttaacggtgtttattcagcagcttggaagaggtttacgaaaggtcgaagggaaagagtttgttaccatactcgactttataggaaactatcaaaagtcgtttatcgttcctttggcgcttgcaggggaagccaactcacgtgcatttgataaggattcgcttcgtattgctgttcagcatgagtttgctgatctaccaggcgcttcttacgttgaccttgaccaaatttctcaaaagcgtattttagaaaagattgatagtatccgtatggacttgattgcgatgttaacaagtctctatgcacagtttaaacatgagcttggtaggtccccagaggtgattgactttctttattcagagagtgccccgaatctgcatttctttgtgaatcgattagggtcttgggtgaaaacgaagaaaaaaatgaaggatctttctaatgaagatgaagttattttagagaatgaacaggtaagtgagctgtttgagcgaatggagaatatgtatccactaaagtggccgtatgagttagccattttggaggcagcaaatgaggttcctgttgttcatcagtcagacgtttttcgtattatccagcgtcgtttcggtattctaccggatgaagaaaaacatcgtagcttaattcatgatgcaatgctgaagttaactcagggctataaaaagcacaagcatgtgattggcattattgaaaatgaaggctttaggatagataaacgcttatctgaagccttatcgattgaggctgttcatgaaaaattcatggaacggatagaatatggaattgtggagtttcgtcgtacgtttaaaccagatcgttttctgggagaaggtgagcgtgtgattcgttatcaaaactattcgcgaaatgatttgatctttttgtttcaagcaggtgtccaggaaggaacttggcgtgagggtgtaagtcgagtagggaaccactatctccttttcattaacttaaacaaggatgaagcggtatcggaccaccttaattataaggattattttatcgatcagcgtcacttccattggcaaagccagaaccaaacgtctcacagctcatctgttggacaaggatatattaaccataaggaaaaaggcattcacattcacttgtttgtaaggaagtttaataaaatgcacgagataacgttgccttttacctacttaggagagatcgactatgtctcaagtcatggagacaagccgatgagtattaagtggaggcttcatcatcccgtgccagaggatttatttattgatttaattcgataaaagattatcgattgttggaatatcagcgggagcccattcaagagaacgtaaatcacgctttggaacccactccaacttagcatgttcttttgctttcggatcaccgctaataatagttgattcatatgtaagtagattaacaatgacgtttgggtattcatgaacaacttctactactttttcttgaaccgtaatttgacagtctagttcttcttcaatttctcgtactaacgtttgttcaggtgtttcgccttcttcaatcttcccacctggaaactcccataagtttggtagagacatggttggggagcgaagggcacagaggaattcatcttgtttgttgcgaattaccgcaccgacgacttttacttttttcatgatttgttagcaactccttttccaattcagctagtcttatattatcatttaactaactcaaaatgcgaaggagagatgggaaatgcctacctacaacaagctagtaagagatcgcatcccagaaatcattcgtgcaaacggaaacaaattcaatactagaattcttgatgaagctgagtacaaagaagagcttcagctgaagctaaaagaagaactacacgagtacctagaagcaatggaagatagtcatgcggttgaagagctggctgatatgctggagctgatctattcattagttgaggttcattattcttcttttgatgaactggaagaagtacgtagggagaaaaaggaagtgcgcggtgggtttgatgaacgggtttatttgattgatgtagaggagtaaacaaaacaagcacacctcagaggagtgctcgttttgtttagctaacatcatagctcatatgaatgtatcgtttcgctttctcaaaatcttcgtcgttgtaaatggttagttctaggtcacctgtgccgtagtgaccgatgttgcgaacatctctactaaactgatcttctaatgtaattgtatcaggatcaattttcagaaagagcacgatcttaccgttttgaggatgtacttccagacatacgaagtttttgattcgcttaaatgctatgtaatatttcaaagtcttcatttgaacgtcatcgcctaaagccatcatataagacttaattgcttcaaaccgatcctgtagctcagttgtcgattggtcgagataatcactgacggttttgtatgcgatttgtttggtaccgtttgttgcggttgatagctcagtggtttgagcagttgtcgcattaacaaggtctaacaagataaagccgtcatgatagtgcttgtattgataaagctcaatattacgattgatttgctgaacggcatgttcatcgtatttcgtgaagccccccgcaatacaaagtagacgtggactactccaatcaattgcatcagctaaggtacttccatacctccgcatgaccattaattcaaactccgctttgtgatcaagcagccagtctaaataaaacagtccctgattaatgacattttcattaatcgatcgtttgtattcaataataacgggtgcattgttttcatcaatacccagtgtgtcaattctgccagcgtgctttttccctgttgtatactctgaggcaagaaaacgtacacctaagaacgtttctaagtgttgctcaataatttcttgtaatgatttttccactgaaaccgactgcccctctagttcagtaacagattcggattctaacctaaataactttatatctcccaacgcttccacctccaccgttattatagcattccatttcatccagaacttcccatgaccttgtgtttatcttaacttaccaataaaaaatgatataattttagtaatggtatattcatccataatcatcttagataattaggagtttttccaatgaacgagcatactctgaaagaaacagtaaaaacactaagtatctggaaaaaaggcaatcagcgtgcccctcataaaccacttctattgctatatacacttgccagattgcaaagtgatcagtcacagttcattccatataaagaagtgaaagaaaaattaacgagtctgttaattgagtttggacctaagagaaagtcctatcatccagaagagccgtttgtaaggttaaagcatgatggaatttgggagttacgaacaactttggagctcgacactcgaaatccaaataatcgattattattagaacatcatgtaagtggtggatttactgatgaagtctatcatttgttaaaagataatcaccaacttttatgtgagatagcagatatactacttcggaatcactttccagaaacattacatgaagatattctagctcatgttggactggacctagaatataaaggcaaacgttcaagagatccttacttccgagaaagaatccttaaagcctatgaatatagctgtgcggtttgtggatttaatgttcgacttggagacaagcttgttggcgtggaagcagcgcatattaaatggcatcaggctggtggacctgatgttgaaaacaatgggatagcactttgttccatgcatcataaactgtttgatcgaggagtctttacgttgtcagaggaaaatacatttctcgtagctgagcaggcacatgggacaagtggttttcaagagtggctgctgcaatttcatggaagggatattcgccgtcccattcatccggattatttaccagaggatcgttttttgaattggcatgttagggaagtttttaaagggccggagcggtatgttatagggtagggatgactctagtagtgtgatataaataattaccccactctaatactactgtgataattaaagttaagaagacatattgaccaaagaacacgcctatcctaaatgattccatcattaggataggcgtgtttagttatgagaagaaaagacttttaatgaacgacattagtaaaacgagggggacagtttcggtaagaactatctcctttgaattctaatgctgttgttaacatcttcctataatgctagtttagtagttagaatacgagatgaataatctatataatgttgaaaatggaagttctaaattaattatttcaaaaatcaaagtcaggggtgatcgaacaaatggaacaagcatggtttgttggtgcagttgttaatggcgatcaaacagaacgattcgttaaagagggcatttgggtaaatggttacgatgataagtatatagatcaggtgaaatcaatgaagaagggagacaaaatcgcgattaaatctgcctataccagaaagcacaatctcccttttgataatcatgggaatactgtgtccgttatggggataaaagcaattgggaccgttacacataactacaatgatggaaagaaagtagatgtagattggcagcctataacaccgataagagaatggtatttcttcactagtagaagtacgctttggaaagtagaagatggaaagggatggatgtacaaaaacttaattgattttacctttaataatgaaaatcaatacattgaacagtttattcaagacccttattggaatagtaaatatggggacaattcacaccaagaatttgaatggactcccttttatgaatctatcgcaaaagctttgctaaagtttcaacataatcgtggtgaattattaaatggtatacatactatatttgaaaaaatcaacatgaataatcctttaatagagaaaagtggtgatggagataaggaactgttaaaggatgtttgtccctttacgatatttggtctttttaataaaggcataacagatcacaacaggcgattaattatgaaagaaatagcgaatttcttagaagtaaacgaagaagtacctcaatcatttaatggtgtgccggtgttaaataacatgaatgcctggttcttcggcaataaagaaaatagaaacgatgacgatttcgataatctatgggaactgttccgaattgcgattgagataactgagaatgattcaggagaagagagtcaaaatgcatttatcgaaatatacgacaaggttcgtagacaatatgggggttcgtggaagattacgattggtttgtattggatcaagccctgggagtatcttcccttagatcaaaatacgagaaaaattctggcagataaacagtttgatatcctgccccgcttacctaaaaagttatattctggtagggaatacgtggatctaattgatgaaatcaaggaaagattttctgacgagaatttcccatttcattcatttcctgagttatcctacaaagcgtgggatggaagtttactagcggaagaggaagatgttcaagaggagttaacaaatcaaacagtagaacatgatgtatatacgaaggaagaatttttaacggaagtttttatagatgagagccaatatgaaacgatcaaatctttattaactaggaagaagaatctcattctacaaggagccccaggagtagggaagacatttgttgctaaaaggctagcttattctttgatgggagagcgagatgaagcaagggtcatgatgctacaatttcatcaaagctattcttatgaagatttcatcatgggatatcgccccaaagaagctggcttcgaactgaaagaaggtccattctataagttttgtctagaagcatcgagataccccgatgaaaattactatttaatcattgatgaaattaaccgtggtaatttaagtaaaatattcggagagttacttatgcttattgaaagtgataagcgtggagataagataacacttacgtattcggataatttgttctctgtacctaaaaatctatatattattggcatgatgaatactgctgatagaagtcttgctattattgattatgcgttaagaagaaggttctgcttcgttgaattggagccagcgtttgaatcaccaaaattcaaagatcatcttttgaaagaaggggctagtgaagaactagtaaataaaatacagcgtaagattggaagtatcaactctgtaatagcaaatgatgtgaatttgggtaaaggttttagaataggtcatagttactttactcattatatcgattccgaaaattggtatgatgaagtgataaggtatgagattgcaccacttattaatgaatattggttcgatgaagaagataaagctaaaaactatgttgaagagttgttaaggtaactgttatgagtaatagcagtatccccgttaaaaacatctaccacatgctttgctatgcgtggaatgtactggaccaatcagatgaaaatgtcgttggtagtgagaagtttgataacatctatgatttattagctagaatatatattaatgggacaaatagtttaataaaaagaggattaagtagaagctacattcaggaacgtagagaagtatcaacgcttaaaggaaaagtcgaagtggctgattcaataaaaaaacaaacgtttcgtaacggaaggatggtttgccaatatgataacttctcggtagacatcaagcttaatcaaattgtaaaagcgaccattaatttattattaaaggcacctatgctagataagacactcaataagaagttacgaaagctacggttctatttcccagacattcgggatattcaattatctaatgaaatatttcgttcatttcgatttaatagaaacaattatcactatagaatgttgatgagtgttagtaaattaatttatcaaggactcattacgagggaagatggtaatgaaacgaaattcttatcctttattagggacagacaaatggcgaagctgtatgaaaagttcgttttgaatttttaccttcgtcatttagatagcggcatctatcatgttcactctcctaaaatacactggaatttagatcaatctattagtgatgaagagttatcccttctaccagaaatgcgaacggatattgtggtagaaaataaactaacaaattcccagcttattatagacacgaagtattatagtgaaacgcttacgactagtaactggactgatagagaaaaagttcgtacggggcatttatatcaaatttttgcctatgtaaacagcagtgattttataggaagtatccatgggatgttactgtatccaaccattaagcaagaaataaatgctggctattcaatggcgggaaaaagcatctatataaaaactttgaaccttaatgctgaatggagcgagatatcgaataggctgttatcgttagtagaggtggttgataataaagaatagtatccaacttttcttagaaaaaattgacactctattgattcataagcaaactataaccaactaaataaggttatcaagagtgaacgagagtacgggctcatagacttcacagcaacctgccaggcggtaaggtgctccaacctgcaaagtatggctatgaatgataacgcacggatagcggaagctctttgttgcattcatttgcgatgaggagcttttttcgttcaatttctgaaaaccttttttaataagataagggagttgatttggtgaatgttaatcgatttgcaagaagcgtgatcgcgaaaaattatagtggtgaacaatttttattacatgtttctgaagtgattgagcgccagctgaaggagtggaatgaggggtatgaagtgctggttaagaagcttatggactatgaggtagtcgtcaaaaaggagaaccgcaattatgaagtgttgcttacggagaaagaactgttttccctacaacagaaagcaccatatgcgcttgatcgatacttatggctggaattagagaagcaaggagttaaggtagtgagaggaaatgggaattatattgagagtgtgatgtgaggcatagcataagcttcaggagtcataccaaaatagcgatgtcgtgcaccctgagggcttaaaacgggttggggatcaatatccaggtaatgtgttttctgtatgtttgtcataagaaattcacgtgaagctgaagtggagtgatgatagccatagaaatataccacctctgacatagagtttaccacctaattacaaaaagtgtaccacagaaagacagactgtataccacaacatagattaagctatgtattacgtcgtagacctatactatgccaaaataaggtgacgttaaaaaggtgtatgtgtatggtagaatatagtaaattactattggctaacagtggtgaacaattccctggtgtatttcacgactaggttttcttactttgaaagatacttttgcaggtgatgcgaataatgaaagtcatctttgagataatggaggaaatagctatggaaaataatgaacttacgcaaggaaaaatgatgcaattattggattggtcatatgaaaaagcactgaatggattacccggtactcctgatgcatatgagttagcacaaagctatttaaggaaacactcatctgtacaaaaaagtgtagatgctctaataaggactcaaaatacaaaggcagccacgtcaggctttctaacaggattaggcggtataataacgttacctgtagctattccagttaatattagctccgtcatttacgtgcaaatgcgaatggttgctgcgatagccgtgatgggtgggtatgatctcaaagatgatcaggtgaaaacactggtttatgtttctcttgctgggaatagtgctgttgatatactcaaacaaacaggaatggatatagggaaaaaggtggcagtttcagctataaataaaataccgggaaaggtgattaccaaaattaatcaaaaagtcggctttagactttttacgaaattcggtgaaaaaggagtaattaatttagttaaagtggtacctgttgctggtggagttgtaggtggggtagtagatttgggttctacaagaacagtaggaaaggtagcaaaaaaaatctttatttacaaagaagaagaaatttttgacttacataatacataagcaggctacttattttattttgcaggacgaggaaactattcaatttagcacgattgtggaaagcctatgcctaattcctcggtaaagataaggaggattagtcttttttacttcaaaaccgctgacatacttctattggtaagtgtgttggcgtagtatggtaaattccttgtcggatggcaagggcggtaaaatctcttggctttattcaagtgaagcaggcacacatagagcgaatcaagagaaccgtccccgcgattctcccggcgattccttagctggtaaataatttctttatcatgtcattagaccttattacaaagaatgtaatggaatcagacatcgtaagaataaaatgatcccatccattaaaaagcaatcgtttaatttttttattcaagttcaccaccagaatacttgaaaataatataagaaagataaacattagtttttttagcactgtaatcccgcctttaggtattaggtcctatttagtttccttctgatgttttatctgctaattgtgaacgattttccgcttggggcggttcttcaaaccatccattttttatcattattttaattccatcatcattgaatgaataaatatccttagcaattagagcgttttttaaggataagtcctttcttaagctaaacgtagatccaaaactctgtcctactaatgaaaatccatttagataaaatgtacaaatcatcataagtttttctgaaaaaggcgcggttgtggaagtcgttactgtactaccagacgtagcagaaaatggaatgtcactttctaaaagaatttcttcaaacgatttaatttgttgttgagctaattttttccctttcttaaaatattgtttaacttctttttgttgagcaacttgtgcaaaacctgtcatcaactgcatgccaatattattagcttcaataccgtgatgtaagtaaccaagttcaatggtgtttaaaggtctcttattcccaaatggatttaatccattcatataatctttactcttaatgaattcagtagttttaggtacggtcacattaggtggaagtgtcatgattccgcgttcaattaaataatgggtggctaatttatatgtattttgacttattctagtgagaccttgataaatggaaataacatcctcccgatacgccatattcatattgagcgtatacataccaagacttacttcttttagaactcggcaaaacattacatcaaagccattgtcaaataattttggcgcttctaaatttacatctttactagataatccaaccgggatagccataccttcttcattgaagattaattccattttctttacaaggtcattcagattttgccacaaacctcccataatgttcaaagattgttgatcatcagctttttcaatgaaatattctaaaattctaagaatgagcgttttttcttgataagttagccaaagcgttccgatttccgatgaactgagtgggtttttcttagccatatgttaacctcctattttatgattatgattatgtgcatttaaggaaaaaatatactaaattgaaagattgcaacctgctcaattaccacgatcctaaggttgataataattaagagcaaattggtacataacatattggcattaattgggttttttaaaatccatcgtttgtatttagtaaataacaaatttgtttaatacgaaaaggaacttcaaattatttagatgaagttccttttttgttaattcattacttcttacaaggattacattattggtacgtagaaatattaccctgaagtgttatatgaggttggcatatgtggggatgtttacagttattaatcaagaagaattgatctctaacaaggttgcattattaacaaaaaccgtcgacttagaagtaggacatgtatgattactaaaagggggatttatatgaaaatcacacggttaggtcatgcgatgtatgtattaacgactaagaacgaaaaacggtatttggtggatccattctttgatatgaatccagggtgtccggatgagtaccaaactgaggcgtttatgaaaagcatcgatgcggtgtttttaacgcatgggcacttcgaccatacgagcggcttggggaaattacttgaacacaaccctgattgcctcattgttgctcaatacgaacttgcgatgattctgatgcaagatgatgtgaaaaatgcttttccacttaattttggtgggacggtccagttagaaggcgtggcagcaacgatggttcaagcgaaacatacatcgagctacaaggaaaccgagggtacgccgatttatgcaggcgaagcggctggttatgtttttgatttctcggatgaccataccttatatcattcaggtgatactgcactcatgatggacatgaagttgattcaagaagtctatcaaccgagcatcgcaattctgtcgtcgtctggtcaattcacgatggggccaaaggaagcggcatatgctgtgaaacatctcttaaacgtggaaactgttattccgagccacacattcctaacggaagaaacggcaccacaacctgaaacactgcaggggttattgaatgcgttccctgttgttcaaaatatgatggataaggataacgaactggcaaatgaactgacaggaagtaacacaaaggtcattgtgatggggtacggggaagaagtggaagtataagtctgctgtccgtacttgccaatgattttttaactttattgaacactctattgagaactagttgtaatggagtgattcttaataatggctttagcaaatatcttgggtaggacattcttccagatcatttgccagaaagttgatttttgaagttgcaaataataaaagtgtttaatagaccgaaagaaatcatgaatgttattaccgacattaccatttgaatgatttatggaaaaaattgaggaaattcctatgtatatcttaactttgctcctatccaaaccgatggaaataaatgtaggttatcaatcggtagataggagcaatctttatgttatttttattttttcaatttttgttattaattcttttgattttcgtagtggttccctttcttttcattaaagctcttcttaaaaaaggtaagcacagggtctctaaaggagaagcaggggagaaccttgttcggaagtatattgagaaactggctgaatatgaaggctatcagatttccgctttccatgatctatacataccaaagggtgacggcacaaccagtcagattgatcatgttatggtgacggataaagggatctttgtgattgaaacgaagaattatgagggctggatttttggaagtgagaaagcacctcactggacccaaaccatctataagcataagcagagatttcaaaatccccttcatcaaaactatggtcacattgagtcactaaaagcctttttgggagagaagttttccgatattccttattactccgtcgtgatttttacgaatcgttctgagcttaaattgaaagagccgttcactaagagcgatgtgattcatcctgagggcctaaaaagggtcgtggatcaatatcggggtaaggttctttccttgttttctcaacaggaaattcgaatgaaattaaaagtacttcaaaagcgcgataaagagcaaatcatggaagttcaacggactcacgttgagggtatcaggaagcagaaagagatcaaccagacgaaggtgaatgtgaatatttgcccaaagtgtggcgagcagttggtaaagcgaacggggaaaaaaggagagtttctcgggtgctctagttttccgaagtgtcgttttgttgcgtgagggaagaaaatgtatcgataacatcatttcaaacgccttctatcctttcatcgataggaggcgtttttattaggatcaactcaatctccgcttttcgaacgtaccgctacaaatatgtcacaatttatccttagtggaactacttgttatgttaaggatcagttaactattattggcatcattattaacttatgggacattttatttataaacactggtagttctctctaattgttgataaaataatatgaaactggtttcagatttttagagttggagtgatcaaagttggtaacgatttcagatgtagcaaagcgatcaggtttatctaagtccactgtatcaagagtgattaataatcatccttacatttccaaagagaaaagagaacttgttcaaaaagcgatggacgaactgggctattatccaaaccctgccgcaagaaggttaagaggccagcttaaaagtaccatcggtgtgatcgtgccaaggattgttaacccatttttttcgtatttggtgaattcgattgagcaaacggcttttgaacataacttccaggtcttgatcttccaaagcaacgaaaacaaggaaaaagaattgtcctttttaaatttattaaaaacaaggcagatcgacgggatcattatgaccgccattgaaaatgatgcggatactattcactcctatacgcagtatgggccgattctattctgtaacgagtatttaaatcattcaacgatcccttctattcgcgtagatcagtctaaaggggcttatttgggtacaaagcatcttatcgaacaaggccattctaaaattgcctactgtacaggtggtttatttgctgaggatggaaaagacaaggaccgcaaccagggttatcaaaaagccttaaatgaggcaggattatcgttgaatccaaactggatctttgttgatcagcattcgattgaggatggaaaagcagttttgaaacagatattacaaatggataatcgacctacagccatctttacaggtagcgatgaggtagctgcaggagttatgattgaagcaaatgaccagaatgttaaagtgcctgaagatcttgcggtaataggatttgacgatcagccgctagctgaaatgctccatccgaagttgacaacaatcaagcagcctatttcattaatgggagagaaggcggtagaagggctcgttacaatgatgcaagaaaacagcagcaatcctgaaaacatcgaattgcctgtagagttaatcgaaagaaagtcgacttaatcagctgtaaaaaaagagttttgaaaaaactccttgaaaccgataccatattaccctataatacaaattaacaagaaaagggagtgaggagagcagtcaattggtcgattttttttgaaaatttatgaaaccgataccagaaatacattgtcgatgaattggaaagcttcatttgctagaaccctatttgctaaggatttttagtataaatttttttgatgttttgtgaaaccgatatcatataaggggagtgtttcatttgaaagggaaaacgattgtttcaacgttactgatctcaagtgcattattaagcggctgttcattttcatctagtgaatctagttcatcagacggcgataaactatccattgaaattttccagggaaaagttgagttcaaggatcagtttgaagcgctggcagaagaatatgagaaagaaaacccgaatgttgatatcaaaattacagctgttggcggcggctctgactacgctggttctcttaaaacgaaatttgcgtctggagaagaacccgaaatctttagtattgcgggtccaacagaggctgctaactttgaacaatatttaagtgatttatcggatacgaaagcagctgaattggcattagaaggtagtctcgatcctgttacaaaagatggagaagtgcatgggcttccttttaatcaggaaggttacggttttatttataacaaaaaggtttttgaagaagcgggtattgatcctgaagaaattctaacctatgaagatctcgagaaagcagtaaaagaaatcgacagtcaaaaagatcagttggggcttgaagcggtatttgccttcccagctaaagaaaaatgggtgccgggtaaccatctttcaaatgtgttcttagcaccagaatttaatcagcaggtgctagaagcttataatgcagaatccgtttcattcgaaaaaggaaaagagtttcaaagaatggtagatttacaaaccgaatattctgttcaacctgttctgagtcttgattactctcaacaggtcgaggaatacttttctcttcaaaaagtagcgattattcagcaagggaactggatttatccttcagtcgagcaaatggatcaggagtttgctgaaaacaacatgggcatcatgccaataccagtagaaggttcagaagggaagctgccagtaggcattcctaactattgggcagtgaacaacaatagtgacgaagaagtgattcaggcttctaaagactttcttgattggatgtacacttctgaagttgggaaagaggctgtcctaaaagattttaaattcatcccggcttatgaaggatttgatacggacggaattgccgatccgctctcaaaagaaatttatacctattcttctaatggcgaaacgactggatgggtcttactcggctaccctggagtctggggagattaccttggcggaaatatccagaaatacctaagtgaaaaaatgacgtgggatgaagtagaagaagattcgaaacaaaagtgggaagagttacggaaataatccattgttaaaagaatacgaacaatccaccacaaagggttgttcgtttctcttttaattgcaaattctttcatcagcttttaacgatcaaggagggtattcatgaacaatcaaaataaatggttttggatctttctgtcaccggttattttagcacttggcattgttgttgtcgttccgtttgtctatggattcgtcttttcttttacagattggaatgggttaacggcaacatcatttgtaggttttgaacattatcttaatctgtttcaagaagaagaatttatgaattcgatttggtttactgtcaaattttcaattgtgacggtgattttgctaaatgtcttcgggctctgtctagccttgatcgtgactcgaaagattaaatccaataacttgcttcgaacggtgttttttatgccgaatttaattggcgggttgattctagggtttatctggcaatttattttcatcagtgtatttggagatgttggcaatctgcttgggcttaaaggcttagaaggttggctttcaacaccggagacggggttctggggactagtgattcttacttcctggcaaatggcggggtacattatgattatttatatcgcctatcttgagaatatccctaaggatttaattgaagctgccaaaattgatggggcaagcgccttacagcgatttaagagtattacttttccactagtcgctccagcctttacggttagtatgtttctcacgctatcaatggctttcaaaatctatgatcagaacctttccttaacaaacggtggtccgtttaactccactcaaatggtcgcgatggaaattgttcgaacagccttctcagataatgaaatggcatacgctcaagcaaaagccgttattttcttcttaatcgtcgcagtcattgcgttaacacaggtctactacaataagaagcgggaggtagatatgtaatgaagataaataaagaaagaaaaagtctattctccgtagaagtattaggattggtgttaggggttatctggattgcaccattctatctcatgattgtgaatgcctttaaaacgaaaagagaaatcttcactggtgtgcttggcctcccggaatcactcgcattagagaatttcgttcaagcctttcgtgaccttgaattcataaaatcattgtttaattcattactaattactggtgtcagtgtcgcgattatcattttgttttcagctatggcaggctacgcattagctcgaaataaaagtaagctgagcggcatcatcttctttgtctttgtcgcagccatgctcattccttttcaatctgtcatgattcctctcgtctctcttttcggtcaagcagatttgctgaatgctgctggtctcattttcatgtacctcggttttggatgcagtctatcgattttcttatatcatggggcaatgaccggaataccaaagtccctggatgaagctgcgattatcgatggcgccaatcgccttcaattgttttggtacatcatcttccctttacttaaacctatttcagtaacagtcgggattttaaacgttatttggatttggaatgactatctattaccgtcacttgtattaggcgaagcgaatgcgacgatcccgcttaaaatgttcttcttctttggagagtatacgaagcaatggcatttagcattagctggattaacgctagccatcattccagtcatcattttctatttctttgctcagaaacaaattattaaaggggtctcagaaggtgccgttaagtagtttgctacgtttaagtcgttaagagatgtaggaggaaaacaatgagtcaagcatggtggaaagaatcagtcgtttatcaagtttatccaagaagttttaaagattctaatggggatggaattggtgatatccagggcataatttcgaagttggattacttacaggatctaggtgtggatgtgatttggatttgccccatctaccgttcaccaaacgacgataatgggtatgacatttcagattttcaagaaatcatgcctgaattcgggaatatggccgatttcgatcacttattaacggaactacacaagcgaaatatgaggttaataatggacttagtgatcaatcatacttcggatgaacatccgtggtttatcgaatctaaatcgtcgacagataatccgtacagagattattatatttggcaccatggaaaagagggagaggagcctaataactgggcgtctatttttgaaggatctgcatgggagtttgatcaagaaacaaacgaatattatctgcatgtcttttctcgtaagcaacccgatttaaattgggagaatcctaatgtcagaaatgagttatataacatgatcaactggtggctcgataaaggaatcgatggttttcgaatcgacgccatttcccatataaagaaagtaccagggtttccggatgtcgccaatcctcttaaaagaaaatatgcgccttcgttggaaggacatcaaaatcgtgaagggatacaggtttttcttgaagaattaaaaaacgaaacgtttgatcactatgacattatgacggttggtgaggcgaacggggttacggtagaagaagcagatgagtgggtcggagaagaaaatgggaagtttaatatgatctttcaattcgaacacaacaacctctggcaaaaaggtaaagacaatgggctcgatattcacgagctgaaacgtgttttcaccaggtggcaaactggccttcatcataatggatggaatgcgctatttttagaaaaccatgatcttccacgatctgtatccgtatgggggaacgatgaaaggtatcacaaggaatcgagtaaatgtcttgcaacattatatttcttaatgcagggcactccttttatttatcaagggcaagaaattggaatgacaaatgtacgatttgagtcaattgaagactatgatgatgtggcgattaagaacctctatgcccacgaaataaaagaaggtaaacctcatcaggaaattatggaggccatttggaaatctggtcgtgataattccagaacaccgatgcaatggtctaatggaaaaaatgccggatttactgatgcgaatgaaccgtggttaaaggtgaaccctaattataaagagatcaacgtagcggaatcgatgacagatgaacattcgatttatcacttttataaaaatcttatcttgcttcgaaaaaatcatcctgttttcatttacggggagtacaagttgattttaccagagcatgattccatttttgcttatacgagaaatctagatgatgaaatcatgttagtcatgacgaatctctttgcagaagaagcggagttccaccttccagaagagttgagaaataaatcttctaaattactaacaagtaattatgagtgtaacgctcaagaaagcattgatcatctatccttaaagccatatgaagcgagagtatataaactcttttaataaatccaatccattgttgaggtgatcttttgaagcatagcgaagaaattctgcgcgcgaccgaatcgattcgggataagcgtagagagatagaggacgatgagtggcgattgcagtatcatgtaaccgcacctgtgttttggatgaatgaccctaatggttttagtttcttccaagatgagtaccatcttttttatcaacatcacccctattcgacagaatgggggaatatccactgggggcatgtcaaaagtcgtgacctcgttcactgggaacacctacctcatgcactcgcaccaagtgaaccttatgataaggatggctgtttctcaggtagtgccattgaaaaagatgggaagctttttctcttctatacggggaatacgtggacaggaaagaacaatgatacagatcttaaacaagttcagtgtatcgcggtaagtgatgatggtgtgaaattcaacaaaattgctgagaacccggtcatctctcaatccccagcgggtgatattcatccaaaccattttcgtgatccaaaagtttggaaacaagagggtcactattattgcgtgctaggttcccaatcaaacaatcgtgttggtcaagtactcctgtaccgctcaacggatttgctaacatgggagttcatgaatgttgccgcgaaaggcaaaggaaatatggggtatatgtgggagtgtcctgatttctttcagttagatggtcaggatgtattaatcatgtccccgcaaggagtagagccagaaggtgagttctatcgtaatcttcaccaagccgtttatgctcttggacatctcgatttgaataaaggcgaatttgatttcgactcatttcaccctcttgattacgggtttgacttctacgcacctcaaacgacacttgataatgaagggcgaagaattttggtagcctggatggccatgtgggaaagtgacatgccagagcgtaaggatcactgggttggagccatgacgctaccaagagaaatctacatggaagacaatcagttaaagtgcttaccagtaaaagaacttgaatcgttgcgtcatgattacctgcatttcgaaaatatcctagtcgaagaggagttaacgcttgatggattagagggagatatcatggaaatcaacgtagtgattgacgccatggaatcatctcaattcggattgaaggtccgttgtaacgaattattcacagagcagacgatccttacatacgacagtgcaaatcaattattctccatgaatcgagatgattcaggaaaaggaccaggaagcattcgaaaagctccaatttcattaaaaaataacctgttaaacttgaaggtttttattgatcggtcttctgtagaagtttttctacaaaatggagaaaaagtaatgagcgcccgtatttatcctggcgaagacgctaacggtgtccaatttttctctgatagtaaagtgaaaatcgttaagttggaaaaatggtcacttagaaacagcatagggtgatgaattggattggatatgcttcttgtatagataataataaaagggtgctttctaaaaaactttctttgtgaaataagagcaaattgaaaagccaggaatgctaatttcaaagcattcctggcttttactttctcacgcttccacaaccttacgcaatcgttcgtttacgatgctttcccagccgttgttcatcgtaatgcgcgcatcttgctacgtcttatcggtgggacctgacccctaaacggatttaagctggaccattaatggaaaattacgataaacttttattagataagaatagataaagtaatcgtaaatgtgaggagtgaagactatggacttaaacccttccgacctaaaaacaaaagatatctacaaactactaaccggttccgttgttccaagaccgatcgcctgggtatcaaccgtgtctgaagacggtgtacttaacttagcaccatttagtttctttaccgttgcttccacaaagcctgctattctcgcagtctcgatcggtcaaggatccggggagcgacagggtgttgaaaaagatacgctcgcaaatatccgctcgcaaaaagaatttgtgatcaatgtggtgtcgagctctctcggaaatgaaatgcaaaaaagtgcggaaagcgttccggctgaagtggatgaatttcaatatgctagcttaacaccaattgatagcaagacagtaaaaccgaagcgggtgaaagaggcatcgattcatatggaatgcaagctccatcaaattattccgcttggttccaacgctcttgttctaggtgaaatgacgcactatcatattcaggatgatgtgtatctaggaaactataaagtcgatctcgaaaagctttcacctcttggcaggctcgcggggaactatagtgagagtaaggagttttttaagttaccgaggtgagcgttattaaatagagaaaagcaactttggcgatgggcctccaagctgctttttctatataaacgttgtcatctaactcgaaaaccactagtgctataagtgggatccgttcgttccaatgactttcttgtaccagaagaacgattccttccttttcctctctaacgttccgcttccatcatcctgcttatctacataaataaaaccataacgtttcgagaattcacctgatgaagcactcacaaggtcaatgcagccccagcttgtgtacccgatcacgtcagcaccgtcttcgatcgcttccccaattgccttgatgtgattgcgaagataatcgatgcgatacgtgtcctgaatcgatccgtcttcttctactttgtcataggcgcctaagccattttccactacgaaaagggggacctggtaacggtcgtatagctggtttaagccaatgcgcaaaccttcaggatcgatttcccagccccagtcgcttgcctgtaggaaaggatttttaataccgccgatgaggttcccttgtgaagcttcgagatcggatttctcctttttctctgttcgggacatgtagtagcttaaaccgatgtaatccaccgtgccttcttttagacattcaagatcaccttcttgaatgtctaactcaatgttgtgctccttgaaatagcgctgaataaaagcagggtattcgcctcttacttgaacgtctgcgcagaagtagttaaagagacgttcttcttgaagggcgtacatcacatttttcggatccgagtcgtatgaataaacgggtgcgtataagatcatacagccaattttagcctcaggaatgatttcgtgacatgctttgacagcgatgctgcttgcgacgaattgatggtgaaacgcctggaatgttggctggtatttgtcttcttcttgttgaatcgcaaaaccaagaccctggatcggcataataaagccgctattgatttcgttgaacgtcatccagtgctttactttgtttttgtaacggttaaaaatcgacgtaacataccgttcaaagaatgtgatcacttcacgacttctccagccaccgtactttttcacaagattgagcggcatttcatagtgagagatggttacaacgggttcgatgccgtgtttgtacagttcatcaaatacacggtcatagaacgccagaccatcttcatttggttctagctcatcgccgtttggaaaaatgcgtgtccacgcaatcgacatgcggaagactttgaagcccatttctgaaaagagggcaatgtcctccttgtagcgatgatagaaatcaatcgcttcatgattgggatagttatatttctcgcgatcaatttgaaaatcgaagccaggggattgaagaatgttcagtcgttcttttccacctggtagcacatccgcaatgttcaatcctttatttccttcataaaagccaccttcaatttgattcgcagccgtagcgccgccccataagaacccttctgggaaattgtattttttcatttcttttaccctccaatggttcgtctagtattaaggtaatcataacgaggtcgagaagaagagtaaatgaagggaacagatcttgtcgtgaataccgagaaaaggaatttgtgacatgaaagtaacgctgtgttacatatgagggtgcggtgctataataagaaaagaagtatagccagcattttagttctgaaatagaaggagaatacggcatgttttcaaatgatatgattgcgtcgttcaatgagttagaaacgtccctatacaactacatctctcaaaacagtgagaaagtcgcttatatgcgcattcgtgagttagctgatgaaacgcatgtttccacagcgacgattttacgcttttgtaaaaaggtcgactgtgaaggattttctgaatttaaagtaaagcttaaaatgcagttgaaagagaagaagaaaacggtcattaaccctccccaacatgcggtagcggagttttttgaacgatcgttaaacgataatcttgaagaaaaaatgaagaaggccgccaagctgattgcggagacggataacgtgatttttatcgggatcggaagctcagggatacttgcggaatatggcgcgagatatttttcaagcttagggaaattctcgttgtacattaaagatccccactttccgattcactccaagcttcagaagaatagcgtcacgatcgcgctatctgtatcaggcgaaaacaattttaccgtgacgcacttgaatcagctgaagcaagaaggaagtcgcattattagcattacaaacacgaaattctctaccattgccaaaatttctgacctgaacattccctactatataacggaagaatttcatgaaaaagcgaatatcacgtcgcaggttccggttgtgtatattttggaatcaattgcgcgtgagatttataagctaaattaagcgtgcaagaagctatttttgaaggaggtcggatgaaatccaagcagcaaacactacactataaagaagtacagcggccaaatcaaatttgggtatgggcgatcatactggccctagctatactgatgtggatcagctttttccgccaggtggtgatgggcattccatttgggaataatcctggatctgatatggaggttacgattttatggatcattttcggcatagcttttccgatcgttatgctcggatggctacgactgattactgaggtgagggacgatggggtttatgtgcggtttgtcccatttcatctgacaactcgtgttttcttatttaaagatatgacgagttatgagagtttgaaataccgtccacttcgaaggtttggtggatggggggatccggtggaatttcagcggtgagaaggcttattccattagcgggaagcagggcgttttgatcgaagtgaacggtgacatgatcttgattggatcacgggaaccggagcggttggtggaagtgatgcatcaagtgagtggtggacggaatgaatagatacgagtgtgaacagcatacgagattcgcataaatagtccttttctctcaggagaaaaggactattttcgtggaatgcgtcgaaagacatagaaaagaagggaaagagagggtattctaagtttagaaattaatggaagttaattgacagaagtacttagaaaatctacttatctcctaaaattgcgaagtgcaaggaatagtagtttagacgatttactagtaaacgacagtggagaccagctatcgtatcaaggggtttactctgtcagagtaaccttgaaagtggggaaagccgactatgaacaacgaatcgaagacggagttaaaagagttagggatgaaaaaaatacaacagctttttggagagacggtgtttgcattaaagattcatgagtttgcgaatttgtttttggaagacgcgtctgttttcacccatttgcatgatgcctatagacatcaactcgattcattagaggtaacgagtcagggtatcgatattttttatcgtaaggaacaaggccttcacacgatttctttttgggataagagtttttcgttagacgatgcttcttatgttcagtttctgacttattctattgatctcatgcgtgaggttttgccactaggtactgtggttgaattggatccacgcttttttaaactgggtgaatctgcttccgaaccgattaaagtggtgattactggccggtttatttttccggaaaattatcgttcgtattttccttacgccggtgtcgtgtatccatttggcgaaatgaacaaagggaacaccatccattttacatatccattgatcaaggaagttgtacatatgggttataaagatgagatggaagaatcgtttgaatatcttatgaaagaagaattgattctggataaagggatcatgtctatcgagttttcggatgatgacatgaggaagcttcagaatgaaagcaaacgtgagcaaaaggtaggtgaacgatgatgcaactttacgattatgacttttgccacaatttgttgtacgcaggatgggatggtggcattatcgataatctgaatgatgcccggcatgagattttgcaaaactttgatcaaatggattttgaaaatgcatctgcctacgaggagatgagggagattgtcgaaggcatggtcgctgaaatcgatcagcttttgtctaagattcaatccgttcagtttaaataaaaggaggttacaccgttggcgagtcaaaagattcaactgaacctttctgagctgcgatcagcattgaattcattggattcaagcatctcagaatttaaaagttacacaaagaatttccatgactctacaagagacgagttaaaaagctttaattctgatttcattgaagaggtcgatgcgttactagataacatgcataatgatagccaaacgcagttattgaacaatctggatgccatttatcaagcaggggacatgctgttagaaaagatgaaagaaacggatgaaaaaatcggcacgacgatcaggagcaacacggaatgaagcgggatctcaagattaattatggtatactggatggcatcatagaacagctacataagtacaaacatgccctcaatacgatggagtcgtctctggctaaaattaatgaatacgtgaagccaaaccaggggaaaagcattgatgcctgggtgttcacgatcgaagaatcagaggattatatccgagcgtatcatgaacaaatccaggatctcctgaccttatttgaatcctatgtgtctgatacgaatgcctacatcactccattagcgagacaagcgatgatgcaagtggatcgaaatgatatctggttcaatctgcagcaaatagaacgtggggtttcagggaatgtcggaaaagcatcgcgcgtcgcaagccgagtaccctacaacaccttctcgttctttgatgatccaaccgaaagtgaaatcgaaaaaagccgaagcaatgaagccaacctgaatcaaattcgtcgtgaaatcaatcggtccgaaaacgtccttcagcaaaaaatggacgacctgtggggcatttataatacaaaagtgaagccgtttgagaataccgatgacgactattatgggaaagctcaaaagctaaaaatgtcctacgcgggtctgtttgaaggcgtttgggacggtgttgaagacctctcctccgacatttatggctttggaaaaggactcgttctcggtttatatgaaatcggcaaaggtatcgtcacagttgccggtgacgccgggatcgtgtacacctctcatcaacttcctgactccgtggaacccgattttctaaaggaagcagcggataaacgagtcgaaggctacaaagcctccgccatgcaggcgatcaaagatccaatgggcgtcgttgaatcaatctcacaatccttctccgatacctatgaagacgaagggattgcctatcttgcaggaaatgcctccacagcctttatcccgtatgtcggcatggctggtaaatcagccaacctctccaaacttgctggaaagatcccgaactccaacccgagcaaggtagctggaagcagcaaagtagacgtcgcagccatcgtgaaaaagcataacgcctttgaaggaatgaagcgcggcatgggagaatttgtccaagacgttaaagggggcatgcaggttgcggggaatccgaatagggtggctgttggggcgaatggatctgtaccgaataatgtcgtaaactctacagttgtacgaagagaaatggatgatacgattagtaggattgttgggagtaaggattcaggtattacattcaagaatcctggagaatattttgatcatatcaatgacattggaaaacgagatgacttaacgaatgaagaaaaattaacaaaaattcatgaagcatacgatagattagaagtaaaaggcgatgttacggtcgtctctgacacgaagtacttgaaatctgatggatttatagatggtagagcgaatatagattggccagatatgatgggatttgaagaaggttcgattcagacgattagtagaaataaccctttaccagaaagatgggatagaattggtggaaaaggtggagtgaattttactactttacctgataatggaggtcctccatatacgtacaatcaacgtgccattccatatctagaaaatcctgaagcgaggcatgtagggaactttgataatgaatcctattttgaagcgattgatgcgattaaaagtgggaatctagaaggactaaatcgaattgccatagcaaatggaaaagaaccattctcagaggttggtttagacacgttaaagggagattataactatcatcaaggaaacttgaaaaatgctgttagaaatgtcgacactacttatggattgaaaggtacagctgctccgtggagaactagctctacaggtgagaaattaatggatggtggagctgaacaaatagtaacaccgctaagtggtgagattttggaggatataggagttatacctaaatattaaaaggaggaataattatgactaaacaagagttcctaaaaagatataaagatgaaaacctaacgatcggtgcggagtatatgatgatacttgacaaggtatcggatgctccccttgtattaggttgtgcatttgatcaaggtgtttggaagatttataaaacaggagagcgaggtggccactacgtaattaaagaaaaagatagtgaagaggaagcgtttgattatttttatcaagtagttttaattcaaaatagaagatatagtaattaaaataatcttatagtctttactagttgaggaaactttatattttccatcttcctacgaaccttactaagagacagtttcattgtctataggaaccacaaattttaatctcctttgttttaacagaagcaatttcataattataagcaactatacgccggctgtatgtcggcttttttctttttctctaagataatatgtcttatgaaaggggaaattgttttcattcaaatctactattttttgtacgtttggattatacatacatgacattgatatatgagtccataagtgagccaccatgtatcccttaaggttagaggttatacatacatattaaaaggaggattaattatgacaacacaagagttcttaaaaagatatagggatgaaaaactaactattggtgcggagtatatgatgatccttgataagatatcagatgaaccacttgtagtaggatgtgcatacgatcaaggggtgtggaaaatttatcaaacaagagagcgaggtggtcactacgtaattaaagaaaaagatactgaggatgaggcttttgattatttttatgagttagtattaactttaaatgactggcgtaaaaattaaaattatattgtagtctttaatggatggaaaagcttaaaaaacttccaccttaagaaataactgatcggtctatgtaagaaaaaatatacttgctgtaaaagaagaatgggaaccaaacgtcgataggatagtagtttatgaagtagtcgatgacctacctgtcatgtctggaaagattggtccgcaaatcgaagaaccattagggggttatttgcaaggtggcggtcatcaaaaacaaatgcttgttagttcagctgaaaggatgagatgtttaaaagtttttgaaaaaaaattaattaaggggttattgattatgttttttacaaacgaaacaaaaacctcttggaaaataaatgatattgaagtaagcataaatgtggatcatatagttaatgccaagtactacgagaattcaggattggttgcctatcttgcaggacaaaacccccataatcctgaaagattggtagtttttaatgttgctggtaaagaaatattcgatataggtaaacctaatggatatctatatatttatctttctagtcaccccaaagctgaagtggtcgtagtgtgtggtgtggttgatattgaaaattcaaatgagtcatggtcagatttttattttggattaaaccaagagactggtaaccttgaaaagctaggagtagcaagatagataaatttaaagtgaataatattatgtgaggttgaatcaccagaaccgtccccgcgatgccccccacgattcccccgccacgccagtaattacccccaacaaaaaaagcgatgttcacgtactaatccgtaaacaccgctcttttctatgtaaaaaaacattgtagttaaaccgatcttatggtaaatttatatagatgcgcacaaactaaaataaatttactcatattaccctattttaattatacaatgcgcgtgattcgtttgtcaatccttttatccattatttaaaggagtgtttgcatggattcgaaactgctgcaggaaaagaagcgattggacagtgtcatgggcactattcaagaggaagttcaacgattagaagatgaaacctccagacggaaaaatgaagtaattcatattcgcaaacacttttgggatgaagtgaaggtgaatacggatacctttgatgattatctggagaccatcatcggattaaggcaagaggctcaagccctttcggtcaatcaaagcactcacaggcatgcatccaaacgcttatcgacgctgcgtcgtatggaggaagttccttatttcgggcgtattgattttagagaagaaggttcatcagatcaggaacaaatctatattggcatcagctcattaagagatgcgagcggcgataacttcctgatctacgattggagagcgccgatctcgagcgtctattatgactatccgccaggtcctgcgacgtatgagacaccaggaggcaaagttcagggaacgcttgagaagaagtggcaatatctgatccgcggtggcgttttgcagtctatgttcgatacaagtcttacgattggcgatgagattctgcaggaggttttgggcaggggcacagataaacagatgcataacatcgtcgctaccattcagcaggatcaaaaccgcatcatccgccatgatcgtggcaggctattaattgttcacggggcggcagggagtggcaagacttcagccgcgctgcagcggattgcgtatttattatacagagatcgggagcatttaaatgctgaacaaattattttgttttcaccgaacacgatgtttaacagctatgtgtccaatgtgctgccagagctcggtgaggaaaatatgcagcaggtgacttttcaggaatacttgaaccatcggcttagtgaagagtttgacgttgagaatccatatgaacagctggaatacgtgttaaccggaagtcatacaccatcttacagggcaaggatcgcggggattaaatgtaaaacatcgactcgtttttttgaagcgatcaatgattatttagagtccctggagcagtctgggatgcggtttcatgacgtgaccttcagagggacaccgattgtttctgcacagcagatggtagacaggttttatcgtgctgacacgtcacttcgtttacaaaatagacttgaaaagctgaaggagtggatcctgaagcaaatcaatgagtttgagaaaacggaatggaatcagccgtgggtgcaggagagggtcgagctgcttagcaacgaggagtaccatagcctacaagcttttctcgcgaaaaagcgcggcattgaaggagaagcgatctatgagtatgaggtggaaccaaaagaattggctcgcttaatcgttcggaaaatgctgaagccgctgcgaaagaaaatcaaggaattgcgctttgttgattttacagggatctacaagcagctttttgctgatccgatgcagctgaagcggctaaaaatggagacgccgaaggaatggacagcgatttgtcaggcaacgatccaatcgctggatgcaggtcatttgcgctatgaagaggccacgccatttttatatataaaagagcagattcagggctttcagacaaacagttctattaagcatattgtggttgatgaggcgcaggattactcggcttttcaatttgagtttctaaagcgcctgtttccatcctccaaaatgacagttcttggggactttaatcaggcgatctttgcccatgcaagtgaaatggctgactttaactcactaacggacttatatggagcggacaaaactgaagtgatcaacatagcacgaagctaccgttccactaagccaatcattgaatttacgcgaaggctcgtgcctaatggggataagattatcccctttgatcgagatggaacgattccagagctgaaacaagtggaggatgacgcagagctttatagcagcatctcttcgaaagtggccgaattacgaggtcaggggttaaacagtattgcgatcatctgcaaatcagcagaagaaagttcccgtgcctatgagggtctgtctggtattgatgggatcaagcttttgaaaagcaactctactgaatatgaacagggagtggttgtcgtcccgtcgtatttatccaagggaatcgagtttgatgcagtcattatttatgatgcgtccgagcgtgtctatggggatgaaagtcttcgaagatttttttataccacctgcaccagagcgatgcatgttttgcaactgtatagtgtaggggagccgagtccgttgttgcgaaacgctttaagagaagggtttattgaaaattgatccctgatagtacgttgtttaggaagctatttttttagaaaagggagaagggagtgctaatgatttagcgctccctatctttattcctaaaccatcaaaaaaaatcactagatttcagattaattgtaaaagtcgtcttttcctttggaacaaactgtattataatgaatgtgttgcaaaatgcaaagtaactgtaggggtgatttagaatcgattcatttcaacagatttattttgcaacattttttgtgggtagttgaaaacggttacaacgctttggtgatgcaaacgggttttaaatgaaataaatacaatctacataaggagtgaaattctcatgttgagcgataaatatcaaaggttacaagaaattttacaagagatggaaagcattgtcgttgcgttttctgggggagtagacagtaccttattgttgaaagtcgcaatcgatgttctgggtaaggagaatgtgctcgcggttacggctgattcagaaacgtatccgagcagtgaattagaggaagcgaagcagctcgcttcattaattggtgcgcatcatcaggtgattgagacgtctgagcttgcgattccgggttatacgcagaatgatgaaaatcgctgttacttttgtaaaaatggtttgtttgaagaggttgttccgattatgcgggagaaagggttccaaaatgtcgtgtatggcttaattgccgatgatatgggcgagcaccgaccaggagtccgcgcagcaatcgagcatgatgttcgggggccacttcaagaggcggatctttacaaagatgaaattcgaacgctttcaaaggaattaaatcttcctacatgggaaaagccttcctttgcttgtttatcttcacgtattgcgtatggtgaagaaattacccaggcgaagttaacgaaggtcgataagtcagaggcttacttaaagagtcttcgtattcgacaggttcgcgttcgaactcatggtgatatggctcggattgaagttgaaccacaggatatgcagctagtaatggctaatcacagaagcatttcaaagaaactacaatcgtttggctatcagtacgtgaccatcgatcttgatgggtataagagtggaagcatgaacaaagtattagctgaaagcaattaagaggaggagtacagcatgggagcatcaagcttagatgacgttctaaatcaggtgaaagaaggaagtatggatgtaaaggaagcgaagacgctactctcttcttttgaagatatcgggtttgcgaaagtggatcaccagcgggaagaccggactggttttcctgaagtgatctttggtgaaggaaaaacagtagaacaaatgattgatattatcgagtctcttaagaagaacacgaaccgcgtactagcaacaaggatttccgaggaaaaagcagaaaaggtgatgagtgttgtagcggaccttgactacaatgagtctgctcgcaccttattctggaggcatcccgatgaaccggctcttctctataatggctatattgccgtattgtgtgctggtacttcagatcttcctgtcgctgaagaagcagctgtaacagcagaagcattcggggcttcggtgaaacgtatgtatgatgtgggtgtagccggcattcatcgtctctttcatcatctggaagaaatcgagaatgcaacggtagcgattacggttgcgggaatggaaggtgcactgactagtgttgtcggtggattaattagtaatccgattgtggcggtgccgacgagcattggttatggtgctaattttcagggggtttcgtcgttattatcaatgctcaatgcttgttcaccaggaattagtgtgatgaatatcgacaatggatttggtgctggttactatgcaacattgattcataaaaatcatcgtaatacgatactagactagaggatgaatgaaatgagaacattgtatcttgattgcttttctggaattagtggggatatgacaattggagcgctacttgatcttggcggagatttagcgcttcttgaaaaagaaatcgcgaaattagcgatcgaatcggaatacaagctagaatcgtataaagtggtgaaaaagggagtctctgcaacaaagtttgatgtgatcctaaccgagcatgaaggaggacatcatcaccgccattattctgatattgtcacgatgatcaacaaagcggaactaaatgaaaacgtgacagcgatggccctttctattttcgaaaagattgggagagcggaagccaaaatacataacatggcgtttgagaaggttcactttcacgaggttggtgcagtcgactcgattgtagacatcgttggtgcaagtgttttaattgattcattggatatctcaaaaatcgtttcttctccggttcctgtaggaaatgggcgaatccgcattgctcatggcttgtaccctgtacctgcccctgcaacgttagagttgttgaaggggattccgattcaacgcacggaaattaaaggggaattaacaacaccaacaggtggagggattttagcagcactagtgaatgaatttgggccgatgccatcctttacagttgaagcaatcggttatggtgctggaacgaaagatttcccagatcatccgaacgtacttcgggcattgctcggcagtcattaaaggaaaggggtgagattggatgtcgcaacgatttgcacatggggaagagcatcttgatcatgagatgatcaaggttgaggtcaaccttgatgatatgcctggcgagtggcttggatatgtaatggagaaactattcgattgtggtgcgaatgatgtgttttattcttctatttatatgaagaaaaatcgtcctggcgtgttgcttcagctcttatgtgatcgaacaaatttggatgacattaagagtgttttgtttagagagacgacaacgcttggtattcgccatttcccgatatctgtccaccgtctagcgagaaaattctatcaagtggaaaccatctggggaagtgtaacggttaaacaggggattcacgagggaaaagttgttgagaatgcccctgaatacgaagattgtcggggaattgcggagaaacataacgttcctataaaagaagtctacaaaattgtgtgggaaaaaatactggatcacaagtaatatctccttctaacacagttatttagggcaggaggtaaacatagatgataaaagcactcgttattgcgccttatgaaggattaatcgaaatcatgcgagaaatcgcagaggaagtcactgattttgagctacatacggaaatgggtaacctgtatgaaggtgttgagattgccaaaaaatcgaaatcacatggctacgatatgatcattagtcgcggggggacggcctcattagtacaggaggtcgtttcgattccggttattgatatccaggtttctggttatgatattcttcgtcttttaacactagtcaaaggattttctggtaaggcagcgattgttgggtttccgaatatttctcaaggcgcagctacaatttgtaacttattggatttggatattaatacgatgaccattcagaaagatgttgaagtggaagatcgcttaaagagtttaaaagatgatggatatgaagttgtcatcggggacgttgttactgttgaagcagcgaaacagttaggcatgaatggggtgttaatcacttcagggaaagaagcggttatggagtcattggatgaggcgaggagagtgtatcagctattctcgaaattgcacgaagaaattctagtttatcaatccattattgacgctgaggagagattgattggtgttgtggatgatgttggaaagttgatttgtgctaacaaacaatttcacgccgaattctcgaatgaaatgattgaaagtacgcctgagttgaaagaaatcattcagtcaacatacaaaagaaaagcgaatcaaacaaaaatgctgacccttcataaccagttatggaatatatccacaagttataatgaaaatcatcttattttattttttgagacagcttttccaaatcgtacgaacgttcaggaggaagatggcggacaatatgccgtcgaagttcaaacgaatgtcccacatgttctgatgagcgggaaaagtaaacagattcaagaagtcatgaagcaagtggagaagtacagtcgaatggatgaaccattgtggattattggggaaaccggtaatggaaaagatactgttgctcaatcgatctatttgaaaagcaagaaaaataacgaaccatttattaccattcattgcgatttattgaaagagggacagttaaaagagttactgcaagagaattattttagggatcatgcaaatggaatcgtttatttaaagcgaatcgatcgattagacgcctattcgcaaaaagagttttatcattactttcatacacacaagggcaaactgccgcggctgattgtgtcatcgaatgatgagttcgctattgatgaacgtgatgctacgatcgatcacgagttgtttacccttttaggtaggttgattatctatataccgccccttagagaacgggtgcaagacattgagaatttaataccagtttttatttcggaatttcattcaaaatacagcaaacaaatcgtaggggtgaggcaggaagcgatgcgagaactgatcgagtatgattggccgcgtaatgtcgatcagctgaagcaagtaattgaacagctagtcttacattctaactcctattatttagagaaagaagaggtttcttcggtcattgcgctgttaaaacaacgtcaagaagatgaatactctgaacacaatcaaattgaaataagcgggacattaaaagacattgaaaagcgggtcattactcaagttcttgaagaagaagatatgaaccaatcgaaggccgcaaaacgactgggcatcaatcgatcaactttatggcgcaagcttaaatcataagcttgtgtctttttttgtgtagttgattctttatatatgctaagttattcaatggaattagccggttcgtttcaaaacgcaacactttgttgttgcgatatgcaactaattttaatttatttagaaaactttaaaaatagtattgttatatgcaacatgttcatatactataataaatgtaagcgttttaatacgtttcttaattaaacagttcttgattgttaagggaactggcattgaaaatagtaacgattgaaatcagtgaaatgggatgaaatacattttcttctcattatagtgaaccgaaagggggtgggaatggttttgaagttagcagttattgcagatgatttaacaggagcaaatgatacgggggtacaatttgcgaaacagggcttagatacaacggtgttgtttccagatacaattttgcaacctaccaatatgactggagatgtaattgtattaaattccaacagtcgtgccattccgactgagcacgctcataagatcgtctcgaatctctcaaaacagttaagtgacttaggcgtagcctctgtcctaaaaaaaattgattccaccatgagagggaacattgggaccgaaattgatgctgtgatggatgtgtatgattttaatgtcgctttcgttgttccggcttttccaaaaagcggacggatcaccttgaatggtatccattatgtcgatggtgtaccacttgaagagactgaaatcgcaagtgatccgacttgtccagtgaatgaaagctacttacctgagcttctgcaaaagcagagtaagcgggaagtagaacttatcactatacgggatattcgagaaggtaaagcttacttagccaaaaagatgaaagcgttatcgattcaggaaccatccaaaattgtggtgatcgatgcggagacggatgaagaattacataccatcgttgaagcaacacaacagctggaagaaaatattctttgggtaggatcagcgggtatcgcctatcatctttgtaactcgtttcatgaacaggcgctcacattagaagattgtgagaatagaaagctaccattactcgtggttgctggaagcatcagtgggattactcacaaacaagttgaggagctaaaagcgaagacaagcatcgaggaagtcatgatttctccgtataagttcctagatgagaaagaacgggagagtgaaattgaacgagccgttcaattaggagaagctcttctagataaaggagacttaattgtttccacgaatcgcgacattaaagcaatcaaccaggtaagggagttccaacagacgcttggaatatcgaacatggaagttggaagtcgtattgcagatgcacttggcatcatagctggtcgtttaattgaaaagaaacagatccagggtgcagtgttaactggtggtgacattgcaggcgcaacgtgcaaggtgttaaatggaaagggaattcggatcatcggcgaagtggaagacggacttccgtatggaacattattcggtggtttgtacgatcgtctccctattgccacgaaagcaggcgcattcggtagtgagcaggctcttgtgaaagcgcttcaaacattaaaggaagttaatatgcaaacgtatgacagggtacaacaataaatcatattggaggaaaaaagatgaagagtttatctaaaaaggtattaggtgctgctacagcattaagtctcagcgtacttgttgcttgtggtggtggaaatcaacaggcagattcaactggtggagaagcagcttcaggcgaagcgaaaacgttgcaagtagggatcacgcttgctgaagactctcattattacaaaggacttgaacattttgctgatcttgttgaagagaaatcagacggtgagctagcgattgaaattttcccgaatggatcattgggtggcgagcgtgacatggttgagagtcttcaagttggatcgcttgatatggtgttaacttctactggaccacttggtggttttgctcctgaaattaatgtcgtcgaccttccgtttctttttgaaaatcgtgaacacgcatacaaagtattagatggcgaaattggtcaggatctcttatcaggtcttgaagatcagagcttaaaaggtctcgcatggtgggagaatggattccgtcacattacaaatagccagcatccaattgaaaagccagaggatctaaaaggattgaagattcgtaccatggaaaacaacgtgcacatggattcttttaaagctatgggtgctgatccgactccaatgtcatttacagagctatttactgccttacaacagggagtagttgatgggcaagagaatccagttccaattatctcaacttctcgcttctatgaagttcaagattatttaacactaacgggtcatttctattcaccagcagcacttttagttagttcgcaagtatttgaaggtctatctgaagaccaacaaaaggcactacaagaagcagcttctgaaggtgcagaatatgaacgtgaaatcgtagccgatatggaagaagaaatgattgcagatttaaaagatcagggtatgaaaattgttgaagatgtagacaaaaaggccttccagaaagcaactacatctgtgtatgatcagtattctgatcaagttggagaagatttaattaaacaaatccaggatgctgcgaaataaaagcaggcattagacttatgatgtggggataaccttcccccatcatattgttttatgggggaggttaggttacatatgaatacaatcataaaaaacattgatagatttaataaggttcttggagtcgtgttagcacttctgattatggttatgtcagctgtgatcttctatcaagtgttttcaagatttattctgaaagattcgttaaggtggtctgaagaattagcaagatacctgatggtttggagtgtctttatcggatctgctttagcaattcgaaaacgcgatttaatttcagtagatgcgattaaagaattgttgtctgaacgtgcgaaagctgtgctgaatgtgttcgtttacgttgtttcaattgtgtttctttctgtattagtgaattacgggtttgtgctaatggggaatattgttcatcaaacttccccagctatgaacatttccatggggtgggcgtattcggctataccggttgggtccatctttatgatcattaattgtgtagcggttattatggaaatcattatgaagcaaagggagggcgatgaacgatgactacagttctattaatatcgatgttagtcttgtttctgttaagcgttccaattgcccttgctattggtctagcttctgcaattgccatttggtttactagtgatctaccaatgctagtgattgtacaacgaattttcacctcactcgattcctttccattaatggcaatacccttctttattcttgctggagccttaatggaaacgggagggatctcaaagcgattggttcacttcgcgaatacgttagctggttcgatgacagggggattagcgggtgtaaccgtcataacttccatgttctttgcagcgatctctgggtcgagtcctgcgacagttgctgcaattggctcaatcatgattccagcaatggtagcgagacactatgatgtcaacttcgctgcagctgtgcaatctgtctcaggtgcgcttggcgttattataccgccaagtattccaatgatcttatacggagtcgttgtaggcgtatcgattggggatcttttcatagctggaatcattcctggtctcttaattggattatcgttaatcttaacggccttcatcatctctaagagacgtggttacaaaggaacagagcactttacgtggcaggagagaatcgatgcgtttaaaaatgccatcttcgccttgttaatgccaacgattattcttggtggtatttatggtggtattttcacgcctactgaagctgcagtagtagcggtagcgtatgcacttattattggagtctttgtttataaagaaattaaaatcaaagaccttattccagtattcgttaaatccggtctaactacctctataattatgttaattattggtacagcaggtttactaggttggctgttaacaaaagaaagaattccgcaaacagtggctcagtcctttatgagtttctcggataatccgttggtgtttctattaatcgttaacgtattccttcttattgtaggaatgttctttgaaacatctgcgtcagtcattatccttgcaccaatcttagcaccgattgccattcagttaggcgtagatccagttcatttcggtattattatggttgtgaaccttgcgattggtatggttacacctccactaggtgtgaatctatttgttgcgatgcaaatatctaaggtcaaattagaaacgctatccaaagcggttgtaccgtttttacttattttaatagcagatgtgttacttattagttatataccggagatctcactattcttagtcgatttgttaaagaaatagtgaatatagaggaggaactaacatatgacagctaaaccaattattgcgattacaatgggcgacccatcaggcgtaggtcctgaagtgattgtaaaatcgtttaaagatgaagcaatctatgaaaacagttcgttatttgtcattggtgatcgtaaaatgttagaaagagcgattgatgtgacgaaagttcagctggatgtgagaagtatttccaagccggaagaagcgaaatttgaatatggaacgattgacgtgattgatctggatcttgtttctgacgcattaccatggggtgaagtgtcgtcagaagctggaaatgcagcattccgttatttagaaaaggcgatttcatatgcgaatgataaaaggattcaggggatttgtaccgctcctctaaataaggaagctctgcataaagctggtcatatctatccaggacataccgagatactggctgagcttacgaacacaaaagactttgcaatgatgttgtctgctcctggcttacgagtgattcacgtgacaactcatatcggcttgattgatgcggttaataaaattaatgttgatcgtcaatatactgtcattaagctcgcacatgaaacgttacaaaaagcagacattaccgatcctagaattgccgtctgtggaattaatccgcatgcaggcgaaaatgggttgttcggtaacggcgaagaagaagagaaaattattcctgctgttgaaaaggctcaagaagaaggaattaatgttgtaggaccgctcccggccgatacgttgtttttcagagcaaaacgtggtgattttgatattgtcgtagcacaatatcatgatcaagggcacggcccaataaaagtgttgggactagagtcaggtgtaaacattacggttggacttccgacgattcgtacaagcgttgaccatgggactgcctttgacatcgctggcaaaaacattgccgatgagaaatctttaaaagaagcaatccgtatggcgtatgagctagcaccgacaaaagttgtctagtcactttttagtagatcgatcaactgaataaaatcatatagcaagagacagcttgtatcgtctcttgctatcctttgtgtaagggacgagttaaggtataagtgatggtgaattatacgattgtaggggcatgataataaacagagtccaggatacgtagtgaacaatcttgaaaaggggtgggaaggatggcatttccgaaagttgcgaaaattaggcagaaattcgaagtggaaagtattacagatgtatcgaaagtaatcgaagaacagtttcagaccgttgaagcaaatcaaaaaataaagccaggtatggaaattgcaattacagttgggagtcgagggattgcgaacatcgatttaattgtaaaaagcatagcggaagaaatcaaaaaacgtggagctacaccgtttatcattccagcgatgggcagtcacggtggtgcaacggctgaagggcaagttgaagtgcttgaaggattaaatgttacagaagaaacaacaggatgtgaaattcgctcttcaatggaagtcgttgagattggtgaaacttctgctggtatcccagtctacattgataagcatgcgtatcacgctgatggtatcattgtaatgaaccgagtgaagccacataccgattttaagaaagatatagaaagtggcgtattgaaaatggcttcaatcggaatgggaaaacacaaacaggcgcttgccctccatacttatggtattaagggaatccgagatatgatgcctgaggtagggaaagtagccattgcgaactctaacaccttgtatggcatagcggtggttgagaatgcccttgaagaaacggctatcattgaagtgatggagcctaaagagattcaggaaagagaaagggaactcctcagaagagcatttgagttaatgccgagtttaccaatcgatgagattgatatcttagttgtcgatgaaatcggtaagaattacagtggaactggcatggatacaaatatcattggtcgcatacgcgtccttggtgtagaagagcctgagaagccaagtgtaaaatacttaattgcttctaacttaagtgaggcaagccacggtaacgcgctcggaattggactagccgatctgacaacgaagcgtttgtttgagaagattgatatgaaagcaatgaacgaaaatgtcattaccagtacatttctagatcgcgccaaaataccgattgtcctcgatagcgacagggatgcattaactgtagcacttcgcgcaacgtggggagtgaaggatgaggagacaaggttcgttcgtattcctaatacgcttcatattggagaaatgattgtatcagaagttctttatcatgaattgaaagatcaatcgaatattgaagtgatcgaagagccaacagaaatgacgtttgatgaagaagggtattttctataatgtaaagtagacgcacttccggataaggggtagacttgctggagaaaacagtgaggaactaccttttttctgtgtgtgtttactaggagaaaggagtgaagagatgattagtagtttaacttcggtattgtttctaggtcttatcctagggattaaacattccattgaacctgatcatgtcatagcggtatcaacaattgcaagtgaaacaaagaaatggtggcgatcatcgttggctggtgttttttgggggatcggtcatacgatgacactctttattgtcggtatgatcgttattatgatgaagggggatataccagaaatttgggccgtctggatggaatttctagttggcgtcatgctcgtatatcttggatttcagagtgtcttgatgttaacaaaacactctgaatctcatacaaagaataggaattctccatttttgaaatcaacggcaataggatttgttcatggtcttgcaggaagcgcagcgatggtcctcttaacgatgtcttcggtcgatacagttggcgaaggagctctctacatgctggtttttggtgctggcacagttataggtatgctttgttttacgacactcatagggataccatttgttcttagcaaacataaagtaaggatcaacaacaatctcacaaggtttaccggtgttgttagcatgctgtttggtgtgtactatatgtatagcgtgtggtgaagctagcagtctatcaacaagccattcttttctttgctattctttagtattcgatctttgatgaatccaaatcgccatttgtaaggtaagtgcatctttaaattcccttggatcatagcctgtgtcctgcttgattttattgatccgatagatgagtgtatttcgatgaatgtacatatcctcagatgtttgttggatattgagattgtttttaaaaagaaaagaaagcgtaccgctatatttcgataaggttttattaataaccctgtttttaaatcgttcagcaacattttcattgatttgatagagaatcgcttgtggttccacgtcttcaaagaatacgatctttttgtttgaatcgcttatttcaaaggctaactcacaatcgtcatacgattgactaaacccttcaagtgtggagaatggattgcttatccccatacggaatggaagggataaatggtgcatttctaaagagatacgcttgattagttttttgacattgtattcatctacaccgcatagtccgataaataaacgattaacgttaataaatcctacaagagcgtaatgatcattgaaaaggttttcaattcgttccacgatggtttggttcggaatcgagcgttcgctcatatgtatgatgacgatggtaaaaggggttggaagctttgtatctagtagttctaatcccctttcaatctgttcgtatgacgggactggcttaagcaattcctccacaatcatttcttttgtgcgctgtttccattccagttgcctggcgatgaattcctgcttgatcattaattctgtcgccattttcacaagacctccaacatcacccatttcttctggatttcctgtgatgccaatgactcctaccacctgattttggaacgagattggtaaattaagtccgggttgggcacccctccattttccttcttcatcagaggaaatggagagtggtgctttacttttaatgacctcaagtgcaccttcatgaatttggtcgatacgctccatatttcctgaagcaataatgacaccctgctcgttcataatgttgatattgcgatttaatctgtttgatgtctcaaggacaatcgttttggcaatagctcttgttaacataaaaaccctcctctagctataatagacgaaaaattcataaaaatcaccctcttttttgtatggagtacacaacgaaatgattcgtacttgcaagtataattgggtataacgaatgaaagcgctttctgagggggtaattattttgaagatcgtcatcgcaccagattcatttaaaggtagtctgacagcaatggaagcagctacggccatcgatcggggagtaaaaaatgcgtatcctttggcaaatacgtcgttaattccaatggcggatggtggggaagggacgctcgaaacacttgtcgatgcaacagatggttttacgaaacaagttcaagtaaagggtccaattggagacaaagtggaagcaacatacggcattcttggtgacaataagacttgtattatcgaaatggcgagtgcatcgggaattgttcttgtgccagaagggaaattaaatccactaattacaacaacctttggtactggagagctaattagacatgctcttgatgaggggtacagaacttttattctagcaatcggaggctctgctacaaacgatggtggggctggaatgttacaggcactaggcttacatcttcttgatgaaaagggacaatctgtaggctttggtggaggtagtttaagagatattcataggattgatgccaaaggattcgatgagcgaattaaggagagttccttccttatagcttcggatgtggaaaatccactcattggtcctaatggggcatcgcacgtatttggaccgcaaaaaggggcgagtcaggaggacgtggcccttttagatagccagttgacacactgggcagacaaagtcgaggaaacgacagggattcagattcatgacaaacctggtgcaggtgcagcgggaggaattggcggtgctttccaggcgttctttccttcaagggtggaacgagggattgatgtggttattaactatacaaagctgaaagaaaacctcgtagaagctgatcttgtgctcacaggggaagggcaagtggactcacaaacagcatcaggtaaaacgccaatgggggtcgctcagactgcccaaaaccttggtgttccaactattgtgatggctggatcgattggaccaggaattgagttgctttatcagtttggaattgtgagtgcgcacagtattgtaaacagcccaatgaagttagaaacagccataaaggaagcgtcgtttttattagaaaaaagtacagaacaagtcgttcgatcttattttcataatcatgttccacaactacaaggaggttcagtttgatgaaaattaaaaagacgattgagaaagttccaggcggtttaatggtcgttccacttatgtttggtgcacttgttaacacgatcgaccagatgcatcttcctttcattatgaatgcattaaagtcactaggtgttgcgcctacagatgaaggtttttatgaaatgctccgaataggagggttttcagaagcccttttcaagaatggtgcgcttgtattaattgcgctatttctgttctctgcaggaagtcaaatgaatttaagaattggtggagtagcacttaaaaaaggggtattgctaaccgttacaaaatatctgactggtttgacggttggtctgttgtttggttatttctttgatccgatgtcaggcttatttggactatctacacttgcgattatcgctggtatgacaaacggtaatgggggcatgtacgctgctttaacaagtcagtatggaaaccggtctgatgtcggtgcggttgccattctttcacttaatgatggaccgttcttaacccttctagcactcggattactaggatctagcttcccaattattgcctttatcgctgttcttcttccaattggaatcggaatgcttcttggaaatttagatgaagagattagagaatttctcaaacctggtgaaattctacccgttccgttctttgcatttgcactaggagcaggtatgaatcttgctaacttctttaatccagaagtggtagctgctggattaacgataggagttctcacgaccgtcctcacaggtggggcaggcattcttgtatttaaactatttaaagaaaagagttacattgcaccagtatctgaggcttccactgctgggaatgcggctgctactcctgcagcgattgcagctgcagctggggtagctggaagttcagggatgatgtcggcgagtgaagctgcttcatttcaaagtgttgcagctatagcaacagcacagatctcaatcgcaactctaacgacagcgatcctttgtcctatcgcagtgattctagtcgatcgctatcaacgtagtaaagggatcgatggaagaatggagtcggaacaattaaaagaatccaatcctgataaaaaggtccaatctgcataagaacagatggactgacttatttagagtcagtccatttcttcatgaatccaacccttaactgacagtaaacccccatttagaaatgaaagtgaatcaagttgaaggtgggggagtgtcactaaaggtccgatggattcaactaaccatcagaaagggatcctgctggaagtttcactctatgttttaatagaattaggaaagatcagaattaaaataagattgtgataagtgaggggtaagagatgaaaacaacattactttatggaaaagataatctttcaattcagcttcccgataactccttcgtagttgaaccaacaaacatggctggcttgcaggacacgaatagagagataacggatgctcttcgaaatcccattggaacacctccattaaaagagatggtaaagtcttcggatacagttgccattgcaattagtgatattacgagaccgacaccgaatcatatcttggtccctctgctcattgaagagttaaatcacgttccacttgagaacttcgtgattattaatgggactgggacacatagagatcagacgcgagatgaatttatccaaatgctaggcgaatgggtcgttgataatatccgtatcgtcaataaccagtgccatgaaaaagaaacgcttgttaacgtgggtgaaagttcatttggatgcgatgtctatttaaataaggattacgtagaagctgacttcaaaatagtaactggattcattgaacctcacttctttgcagggttctctggtggaccaaaggggatcatgccaggcatcgctggaatcgaaacgattatgacatttcataatgcacgcatgatcggtgatcccctcgctacatgggggaatatggtcgacaatcctgttcaggatatgacgcgcgaaatcaacggtatgtgtaaaccggattttatgctgaacgtaacacttaatcgcgaaaaagacattacagcggtattcgctggtgagttatacgaagcacatgacagaggttgtgagtttgctaaagaacatgcgatgatcaaatgtgaggaacgctttgatgtggtgattacctcaaattctggctatcctcttgatcaaaatttgtatcaggcggtaaaagggatgagtgcagctcataagatcgttaaagaaggtggagccatcctggtggcttcggaatgttcggatggcttaccaagtcatgggaattactcgaaaatcttcgaaatggccgaaagcccggaagaattactggagatgatcaacaatccagaatttaaaatgtttgatcaatggcaagtacagaagcaagcggttattcaagtgtgggctgatgtgtatgtgcactcaaagctaacagatgaacaggtcacaggtgcaatgttgaaaccgatgcctaatattgaagatacactagaagaactaaagaaaacgtatggggaagagatgactgttgcggttctgccgttagggccattaacaatcccatatgtcgaagaatgactcccgattggggggtcttttttgtgcctgaaggggagcgatagatgcgcaaagcaagtctgaatcccaacgtctaattccaatatttatcaatttttgtaatctaactggagattagtattattatattttaaaaaatcagataaatttgaaatttcgtgttgtaatagttagaaaattatgattataatacttgtaggacgaccgacgtaggaggttgttccaatttacaaaaaagtggtgattttgatgaaattggcaaccagatccttgtatcttcaagctagagatatgatttatgaattgatcaacgacaacttagaaccgatggacaagattccttcagagcaaaagttatccaaagaattaggagtaagtagaaatacaattcgtgaagcgatccgtacgttagaacaagaagggtttttatttagtaggcaaggagtaggaaccttcgtcatcggatcgaaaaacagcttaaaaacaaacatttctacattggagagctcgacgaacatcattaaagcgcacgggtacaatcctggaactgtgaatgtacactcatcagttttaccggtttcaacagaaatgaaaaagactctatcacttgaggaaggacaagatgaaatcttctatattgaacgagtacggactgcaaatgatgatcccgtggtctatgtagaggattacattccttaccgttcagggatggaacatgaataccaagagatttattacgagtctctactcgattttctcgagaattttgaccttaacgtctcgttctcagtctgttcgatcaaagcggtcatcagtgatgagaaaatggccaacaagcttaaacttactgaacaaagtgctcttctactactgaaacaaacgcactactccaatacaggaaaacctgtcttatattcagacagttactatttaagtgacaattttgagttcaatgccattcgaaaaagaggttaaaaggaggtgtactgaaaaatctgtcgggtatacttaggggtttacatttgggtttaacaaaggggaggaaacttaaatgagtaaagtagtacaagcagtttcgactagcagaaaaatgaaagggcttacaacggtcgatatcgtcttgatggcaatcctcgccatcgtgaacggcgttgccatgacgtacattgccatgttaaatcagcttcttactgctctaggtggtccggttctcacatcgatcacgttaggtctttatagtatctcaggggttcttgcagcatatatcattcgaaagcctggggcagccttcttcacgttaacacttgctggtgtggttcagatcatctcaggaaatccgaacggactgatttctatgacggcagccatgacggacggactcggtgtcgagctaggattcatgctatttcgctacaagcgttgggactggtttagtacggctgtcgctggactccttgctgtaccgctttggttcatcatcgctgccttctggttcggttattacaagtggggcatgacaatccttctcatcgcattcgccgttcgttgtctcagtggagtaatcctctcaggctggttgagtaaaatgatcggtgacttgctagtgcgtacggatatcttgaaaggattcagcattcataaacagcagaagaagggagttgatgcggatgaaacccatcattcagcttaaagacgttacttacatttatgaagatgagacggagcctgtcttgaaagactgctcccttgaaatcaatgaaggtgagtttgtcttaatcgttggtccgagtggttgtggaaagagtaccctctgtcaaacgttcaacggaattattccaaacgtgatggaaggcagaatcggtggagaaatcaacgtggatcagaagaacgtactcgaactcgatttaaaagatttatccacgagtatgggacttgtattccaggaccctgacgctcagctttgtaacatctatgtagaagatgaagtcgcatttgcacctgagaacttgaaggtcgatcctgttgaaattcgtgggcgtatccagaattgccttgataaggttgggatgactggatttgaaaatcgcaaagttttcgagttatctggtggacagaagcaaaaggtcggcatcgcatcggtactcgcgatggaaccacaaatcttagtactcgataatgcgacggcaaatcttgatccgcaagcgacaaaagatatttttgacctacttcaggtgctacataaggagtttggtcatacgatcatcgttgtagaaaacaaaatcgatgacattatgcatctcgtcgatcgtgtagttgtgatggaggacgggacgatcattcaatccggaacacctcagaaagtgttggaatcatcgatcgaccaactaactgaaatgggcgtatgggtaccagagatttcagaacttgcgattcggctgaaagagagaggtatgattttcgatcgtttcccgatctccgttgaggatgcggtgcaagaacttgaaggaaggtggaaatcggaagcttcgtctcaaggttcaaaaggtgttccacaattgcagcctgaagtattgagggtgaaggggcttgattaccattatccaaacggcacgaaagcgttaaagaacattgacttttcgattaaaaaaggagacttcgttacgatcctagggacgaatggctccggtaaaacaacgctggttaagcatttgatgggaatcatccgtccgcctaaaggcaaggttttcttaaaaggaaacgatacgttcaagcgtgaccttctttcgatgacagatgatatcgggtacgtgtttcaaaaccctgaacatcaattcgtagcggacaatgtgtttgaagaagcaatctacagcttgaaagtaaagcatggcatcgagggtgacgatccactgcctgatgatattcaagaacaaggtgtacgagcactcatggacgttaaccttttagatcagaaagctaagcatccgttcatgctgagtggtggagaaaaaagacgacttagtgtcatcgcgtcccttattttaggtcaggatatcgtcattcttgatgagccgaccactggtcaggattatgcgagtgctacaaggctactagagctttgtaaagatctccaaaagcagggcaagacggtgattatgattacgcacgacattcgcctcgtttgtaagtgggccgattcagcactcgtcatgcaccaaggtgaactaatctatgacggagatgtgaagcgactcttcatgaatgaagacgtgttgacgaaagcgtcgttgatcgagccaccgatctcgcttctcgctaagcggttaattccatccttgatggatgaagctgtgatcacgatagatgattttctactaacccaagagagggtgaaacaagtcctatgagcttagcgttccaattttatgagaagaagtctttcatgcactcccttgatccagtgacaaagcttgtatggatggtttgcatctcaatcctcgtattcatctatgagacggccattcctcagctcctgttgttcgcagtgattctcacggtcgcgctgatctttgcaaaattaagtcttggatttgtgtttcgaggaatatggatcatgctgttgtttagtattggattcttcgttttacaggtgattttagttccaggtgaaacactgctctacaatctggggccgatcgcgatctattccgaatcgcttgatttcgcgcttgcgatcacgatcagaatcttaacgatttttacaacatcacttatctttgttgcaacgagtgatcctagggatatcgtgatctctttaacacaaaagatgaaagttccttatcgctatgcgtattcgatcttcgttgctttacgcttcgtacctacgctcgaacaagaagcgaaagtcatcgaagctgcgcagacgattcgaggggtagggaagcaaaaagggttgaagaacaaagttgagaacttgaagcgatttacgttacctcttctaatgggagcgatccgacgcgttaggacgactgcgaacacgatggaagcgaaggggtacggagcttaccaggaccggacgtatatccggacgatcaactacaacccgaaaggcatcacattcggcgttgcctggtgcgccctcacggttaccttactatccatgaaattactatgaagggggagatctatggatggaagaaatgaagtttgaagtcgcctacatgccgaaagaagtgaaggaagatgttcctcaagtgtgtgttctcgtcgacgtactcagagcgacgaccgcaatggtgactatgcttgaccagggttgttcagaaattattttgaccgacgatgaaaagtgtactttaaagaaagtcggcgtagatcagaaaacgcttgtctgtgcggaagatgtatacggcaatgtgtccgaacatgcacagtttagcccatcgctgatctcgatcaattcgatggacctgactggcaagcgggttattttaaaaacaacgaatggcacgcttgctgggttcacgctttggaattctggtaaccagcacgtgctagtcggttcactcagaaatgcaaaagcagtgatggacaaagctgttcacatggcgaatgatcttggagtaggtgtcatcatcgtttgtgctgggcgtgagaacggtcagatcgcagcgctcgatgatgcctacacagcagggatattgcttgagtatggaaaagaggctgcggaagcgttgaaccgcgtcccacttgttaaggattccgggaagatcagtagtcatctgttaaaaaggtatccaggcactgttgaagcattcgaggattctggtagtggagaaacgatgagacgaatcggatgcaaggaagatatcaagttatgttcagtcgaaaacctatcagacttagctcctgtccttgagttcacggaaaacagctctattgtagtaaaaaatatgaatgaggtggtttacaaatgactaattggaaatcaaacgcatcgaaaccggtaatggacgaaggattacagtatcacatccgttgtaaagaaggcgacgttgagaaatacgtactgttgccgggtgatccagatcgcgtggatatgatcggtgacgagtggacggaatctcgtaaaattgcaaactatcgtgagcaccgtacgttcagcggaaaagttggcgaagttggcatcacggcttgttcaacaggagctggtggtggatcaacggcaagtgcatttgaggaacttgcagcattaggtggcgatacgttcttgcgagttggaacgacagctgcgattcaggaacatatcgatccaggcgatatcatcatttcatcaggtgcagttcgacacgatggaacaagccagttctacgtagatgatcgctatccggcgagcgctcattatgaagcgacgtcagcgctagtagaagctgcagagcgacttggttatacataccatgttggtgtttcatgctcaacggcatcttggtattgcgggcaagggcgaacaggtttgaatggctatgaacaatcgttcttcaaagataaagtacaggatttgaacaaagcgggcgtgatgaactttgaaatggaagctgcgacgatcttcacgctagctggactatacggcttacgagctggatctgtttgtacggttgttgcgaatcgaatccgtgatgaattctcgtacggtggtgtagagaaaagtatccgcgtcgcaaatctagcagtccaaatcttagctgaatgggatcaattgaaaaaggaacgtaaaaaagactactggttcccatcgatgacagagaatacaacagttaaaggttaaggaggaatcatactatgatcgaagtcgatacaacgaaaggtatgttcatcaacggcgaatggatttcatcagagtcaaagctcgaggtatttaatcctgcgacaagagagaagattacagagattccatcaggcggaacgaaggaagcaaagcaagcgattgagtccgctgaagcagcattcgaaccctgggccgagttaacggccagagaacgatcaacttatctgtataaagcttatcatctcatgcttgagagaaaggaaaagctagcggctattctcactgaagagcaaggaaagcctctaaaagaagcgcgcggagagatcgagttcgcggcaagcttcctcctctggtacgcagaagaagcgaaccgtgtgtatggtgagatgattccatcttctaagaagaataaacgactatggatcgtaccaaaagcgatcggtgttgtcgcagcgatcacgccgtggaacttcccagcgggcatgataacaagaaaagtcggtccagctcttgctgctggttgtacggttgtactaaaaccagcagagcaaacgcctctgactgcgatcgagatcgtgaagatctttgaagaagttgggctaccgaagggtgtattgaacatcgtagtcggtgatgcagctgaaatcggtaaagagatcatggatagctctgcagtgaggcttgtgacgttcactggatcgactgaagtcggaaagcttctgatggaaaatagtgcacagactgtgaaaaagcttgcgcttgagctcggtggtcacgctccgctcatcgtatttgaggatgcagatcttgatctagcagtcaatcaagcgatcgcgagtaaatatcgaaattgcggccagacgtgtatttgtacaaaccgactctacgttcattcaagcgtacgcgatgtgttcgtcgagaagctcgagaagaaagttcgggagctgaaagtaggaaacggagccgatgaatcgattgatgttggacctcttatcgatcatagcggcctcgataaagtgaaagatcaggtcgaagatgcgctatcgaaaggtgcgattctgctgactggaggtatgcagtgggaaggtccaggcgggtatttttttgaacctacgattctatcgaacgtaacgaacgacatgaagatcatgtcggaagaaacgttcggacccgtcgttccgatccagacgttcgaccgagatgaagatgcggtggcggcagcgaatgataccgactacggtttggcttcattcctgttcacaaatagcttgaacagagcgatcaaggtgatggagaagcttgagtacggaatcatcgggatcaacgatgtgttccctggtaccgcagaagcgccgtttggtggaatcaaggaatccggtcttggcaaagagggtggccatgaaggaatcaaagaatatcttgagatgaagtacgtctctgtcgccctttcagacaagctgtaaaaaggagaattgataatgacatatccagagatggtgaaggtgaaacagcgttttccttctgagaaaatcgaaaacatcgcgctacatctgacagaggagctgcgaaatcagctccctactgttcagagcggggatcgaatcgcaattactgtaggtagtcgtggcatctccaatcgcgtcagcatcgtcaaaacggtagtcgattatttgaaaggtcatggcgcagaaccttttatcatcggtgcgatgggtagtcatggcggtgggacgcctgaagggcagatggatgtgctcgaaagcctcggattcacagaggaagcgattgggtgtcccgtccgcacttcttcaacggtcgtcgagataggaacgacagaaagtggatttatcctttattgtgatcgattagcctctgattcggatggcatcatcgtgatgaatcgggtgaagttacataccgcattccgcggtccgaatgaaagtgggttactgaagatgattacggttggtctcgggaaagcaaaaggggcgaaccagctgcatcgccaggggccaccgaacatgtcgaagaccattcaagaagttggaagagggatgatcgataccggtaagattcttgctggaatcgcgatcgtggagaacagctatgatgaaacggctcatctagaagtaattcgaccagagtcgattcttgaacgagagcgggagcttttacttcattcgagagactactttccaatgattccagtcaatgaattagatgtgttggttgtaaaaaagatgggcaagaacttcagtggaaccggaatggatacgaacgtgctcggtaggacaaagatcttcggggtacctgagcccgagacgccttcgtttaaacggatcggcgtccttgatcttgatgattcctcgcacggaaatgcgaccggaattggattagcagatgtgacgacggagcggttgtttcaaaagatcgatcgacagaaaacgtatttgaactgtttgacaagtacgtatgtccagcgcgcgatgatcccgatggtactcgatacggatcaagaactcgtgaagacggcggtcgaaagtttggcagttgaagatccatcatcgttacgcatagccattattgaaaacacgcttgaccttgaaacgctgtacctttcacataatgtgattgaggaagcaggagagcaaatagacgtcgtatcagccccagaaccgattgcttttacagaagacggagagttgaactatttcaaagaaagcgcaggtggagacaattgacgaagtcacaaacttcttacggagatgctggattcagtgaatttattagaatggcgttcagtcgtcatcttggacatgacaaggaagactataacaagccggtgatcggcatttgtaatactttcagtgagattaatcgttgtcatagtcatgtgaagccgatggtggaagcgatcaaacgtggtgtcattatggaaggtggtacgccgcttgagtttccaacgatttcggtcggtgaaatgttcacgagtccgacgactatgctgtaccgaaatctcgttgcgatggataccgaagagatgatcaccgctcaaccgatcgatggaaccgttatgatcggtggttgtgacaagatggctccagcacaactcatgggagctgcgagtgcggataaacctgcgcttctcttcacgggtggaccgatgaataacggtcattacaaaggaagaacgcttggagcttgttctgattgtcgctttttctggcaggaatacaaagcgggcacagtcgatgaagaagaaataggggagatcaatgaacgtcttgccccaacagcaggccactgtatggtgatgggctctgcgagtacgatcgcagcgtgtgcggaagcgatgggaatgatgcttcctggaggagctgcaacgccggcaactgaaaatgagcggatgcggatcgcccaggaaacaggtcgtgcgattgttcgccttgtcaaagcggggatcaaaccttcagatattatgacgaaggaatcgttccataatgcgattaaaacgctgatggctgtaggaggatcgacgaacgcggtgatccacttgatcgcaatcgcaagacgactaggcatcaaattaacgcttgctgatttcgatgagcacagcagaacgacgccgtttcttgcgaacatgagacccgctgggaagtaccagatgcaggatctgtactatgctgggggcatttctgccgtgttgaaagagctagcgccgatccttcatacagaccaactaacgggtactgggaagacgctcggagagaacttagcggatattgaaatcgatgaggtatatcgtgatattatccgtccactcgatgatccactacataaagaaggtggcattgcagtattgaaagggaatttagcgccgaatggtgcaatcattaaaccgaaagctgcaacggaggaacttctaaagcataaaggaaaagcagttgtatttacttctcttgacgatatggctgagcgtgtgaacgacccggatctcgatgtgacccctgagagcgtacttgtgttacaaaacgctgggccggtcggagcaccaggtatgccagaagcgggcatgattccgattccggataaacttctgaaacagggcgttcgagatatggttcgcctatcggactgtcgtatgagcggaacagcgttcggaaccgttctcttacacgttgcgcctgaagctgctgttggaggaccaatcggattgatcgaggacggcgattggatcgaacttgatgtggatagtcgaaagctagagttgctcgtttctaaagaagagcttgcggaaagaaaaagtcgctggacacctccagtgttcgaagattacaaccgtggttatccgcttctataccgtcgtagtgtaatgcaagctgatgaagggtgcgatttcgatttcatgcttccggtgccgaatattaagaaccaagaggagaaaaaggaatccgtatcaggggctaagacatgaaggaaatcttactagcacttttggccggcgtgttgatcgggatcgtcttcaaagtgattcgccttccaatccctgccccacctgttctcgcaggtgtggtcgctatctttggggtatggcttggcgcatatggcttaacctttttgatggataaattgacgaattaattgaagggggaagatcgagtgaaggttggattaatcggtggaacgggcttttatgacttattcggtacgctagaggacattatcatggcaactccgtatggagatgtgacactgttcaaaggagagcacggtaataaagaagtttattttctaccgagacatgggacgacgcacggcgtattagcacctgacgtgaattatcgggcgaatatgattgcattgaaaatggtaggtgtcgagcgggttctagcggtttctgctgtcggatcggtcaatccagacattcaggtcggatctgtttcactactcgatcaattcgtcgatatgacgaaaagaaggcagcaaacatatggagagttttcagccgacatgacagaacctttctgtaacgagatgaaagcctcgatccagggtgctgctagaatgctcggattaccgatgcatgaaaacgtcacgcttgtcggcgtagatggtccgatctatgaaacgcgacatgaactgcaactgtttcgttcatggggcatggatgttgtcggcatgactaacacgactgaagcagcgctcgcacgggaactcggcctttgcttttctgtcatcacgttatcgaccgatatggcgacgggatttgcggaaaagcctccgaatctagaagcgcatcggaaagtggcagaagaaaacaaagggaagatgaaggacctagtgttgcaaacgcttggcgacttagaacgaaataaagagtgtgcttgtaccgttccatatcaaaacgcgcggttagcagcgcattaatttaaaggaggttattcatagatgaagatcgggatcataggaggaactggattttataatctactagatggtatgcaagagaaaacggtaggtacggagtatggagatgtaactgtttttcaatcgatatatgaaggaaaagaagtgacgttcctcccgaggcatggaaagtttcatgatacactcgcgccgttcgttaattatcgtgcgaacatgatggcactaaaagagttagggatcgagcgcgttctagccttttccgcggtaggtgcgatcaatccggatattggggtcggaagcttatcgctcctcgatcaattcgttgacttcacaacgcgtccgaaaacgtacggcaagttctccgtcgatattactgagccattttgtccagaactacaggatgcgtaccggaaatcagcaattgcgatcgatgagtcactccgtgaagaaacgaaactcatctgcgtagacggtccgaggtatgagacgaaagcagaggttcagctctttgggacatggggcatggacgttgttggaatgacgaatgcgaccgaagcatcgctcgcacgagaactcggcatctgctatgccgtcgtcacgctcgcgacgaatatggctcctggcgtcaccgagacaaaaccttcattgaaagcgcacaaagcggttagtgaaagcaagcgggagaaagtgaaagaactgatgctagaagcgatcaaagcctcaggaggaagacagagctgttcatgccctgaagcgtacgagcgtgctacggtcgcgaataaatgatcgatgtctcataaaacgcttatcaaatattcgttcatcgtctcgaatgatccttcgttcggaaaccaaaaagggtcagtgttcatcgaaggagatcggatcacacacgtgataccagagcatgatacgagtttgctagaaaaactgagccaacaggctgatgacgtaatcgatgctgaaaacgacatccttattcctggaatggtgaatagtcattaccattcttatacgaatgtgttgaagggaactgtgaacaacctcccactcgagctgtggacactctatacggttgcgtacggacatgcgctcgaagatgaagatgttacgctctccgtattgctcgggtgtatcgaaatgatgaaggctggtgtcacaagctgtctcgatcattttccccatatcggaaaatcggaaccagctctttctgcatatgaagagtcaggcatgcgggtagcgttcgctccgatgatgcatgatgttcctgatgaggagtttttcgacctatacgttccaggttcactcagaaacagatcgaaaggttcaaatccaactgagatgaagagtttatatcgatcacttctatcaaactggcataatcaggatgggagaattgagatccaacttggtccgaatgcgccacagcgttgttcacctgagatgttagccatatgtaaagagctcagggaatcagaaggtctacgagttcacactcatctgttggaaacgaaggcgcaacgattgaagggagacatggcttttgatggtggtatcatcggctaccttgatcgagccgggttgatcgatgagcggctctccgtcgcacacgcgatatggttggatcattcagaaatcgagattttacaagaacgtggtgtctccgtcgttcataatccagctagtaatctattgcttggaagtggtgtcgctccgattccttcttttataaaggatgacgttgcacttggaacggatgggtcgaactgcggatcgaatcagcatctgtttgaagcaatgcggctgactgccttaatccatcgcgtgaaccaaccttatagctcctggcttgattcggaagctgtgtttcgaatggggacgacgtcaggtgctaccgttttaggaaaagaaaccgagctagggagaatagcagaaggcgatttagcagacgtagtgttactagatggaaagacaagtttgttgtccccgcttaacgatgcggtctcgcagcttgtgcatcaggaaaacggtcaatcagttaagtctgtcatggttaatgggaaatggacggtgaaagaaggaaaacttctgacgatcaatgaaaagaaggttcttaggaaagtaagggaacgacgcgaggggatgatgaatcggtgccggaaatcgttagttcgggtagatcaattgagaccatatttcgagcaggctatatccaactataatttccattgagaggggatcgcatatgaatgagatgctgctgaaaaaggaactcgcttatatttctcataaagtttatggtcgcggattaacgcaagcaacaggcggaaatatcagtgtgcgcgtaccaggtcgagacgcgatcttaatcaagcgttcaggtgttagtcttggtgaagtcacttctgaagatgcgcttctgctatcgatggacggtgaggtgatcgaaggatttggaacgccttcgaaagaatttcgttttcaccttggtatctatcaaactcgccctgatgtaaatgctgtggttcactgtcatccgaactactcgatcggatatgcttgctttggtcgagagcttcctcttccaactgttaccgcaagaaaaattcttgaacatgttcctatagcaggagctgccccatccggttcactagagttagctgaaaacgtaacgcgactcttcaagacgtatccgactattaaatcatgtttgatggaagagcacggaatttgtaccgttggagattcactcgaaaaagcgtataacatcgcaacgctcgtagaagataccgcgaagcaatccttcatcatcgaacagttgaaagcgacgatgccagagaccgttataaattcatataaagggtgagcaatatgctgcaaatagaagagttagttcgatcgtttcaagatcaagagctcctgttaccagtctggttcgagaatgaaaagcttcacttcatcgatcagaagaagctaccgtttgaatctgaagtctactcgacaacagatgtgaaggatctcgctttagcaatcaagaatatgaacatccgaggctctggtgcgatcggaacatgcggcgcttggggaatctatcttgcggctcttcaatcgaatggcgatccacagaaggttctcaaaacaggaatattactaaaacaaacacgccctacggctgtgaacttgatgaaaaccgtggatgaaatgctttctattgcaaaagggggaggctcagacctcatcgatcgaatcgagcagaaaaccattgagattctcgaaagacagctagcgtttgaacatgagctcggacgctatggtgctgagatgctcgacgatggtgattctattcttacgcactgtcattccggggccctagcaggatctggctacggggggcgagcactttccgtgatccgaaaagctcatgaacaagggaaaaacattcatgtgtacacgtgcgaaacaagaccatatctacagggtgcgagaatcaccgcatacgaacttaagaaattcggcatctcgcatacgctcatcacagataatatgtctggctacttgatgagtcgagggaaggtgcagaaggtcgtcgttggatctgatcgggtggcagggaacggtgacttagcgaataaaatcggaacgtatatgcatgcgctagccgccaaagcgaacggtgtttctttttatacagcgacttcgagtcatacgatcgatcatgatgtagaagctggtcgcgacatcgaagtcgagtttcgtgacgcttcagaagtcacatcttttcaaaatcgaccgattgccccagaaggcacgaacgctctttacccatctttcgatattacgccaaacgagctgatctcaggcatcatcacggaaaaaggtgttatgactgctccttatcgatcaacgctacaaaacttgcggtcaactgctgcatctcaaacctagttaaaataaaaagaaatttacccaattatactttctcccttctttctaatagccatgttatcactttaaggaatctgtgaagacagtgagagaatagcatagcaaaaatcgttctcatcatgcatcatatttagggagtgctaatgatttgaatcattggcactcccttttattatgagttggaggggaagggttcagacatgtacctgacccccctccacctgaactggtatgacagcagatcgcataggaataagttaaaaactccgccctctacaaattatcagaaaactgcgagttgttcccttggcttttttcatatcattcaaatgtcacgttttttattaagcttgtaaaaattgtagggaacatctacttaaaaatgagagattgcctaatagctcatatgaaccaactttgattttatgtctttgaactatagaacattgtttgaaaggtgtgctagatttaaggcgcactttacaaaaggaacgaagaaccatctatacataaaagagagcacctggctttgttgtgtcttaattctcttgtttgccttaaaaacgatgactatctccttcgcctgaatggaggtgttagtacataaataatcaaaaaagtagggggcattcctgtgtttaaaaaatcgattttagtagtttttacgttggttctgttgtttagtggctatcaatttggtctcccatccgctcttgcgatccctcctggaacaccgtcaaagtctgccgctcaatctcaattggattcattaactgtacagtctgaaggctccatgtccggatactcgcgtgccaaattcccacactggatcggacaggggaatggctgtgacacgcgtcagttggtgctacagcgggatgctgattattataagggtgactgtcctgtaacgtctggtaaatggtatagctactttgatggcgtgcaggtgtatgacccgtctgaaggtgtatgacccgtctgatctcgatatcgatcacatggttccgttagcagaggcatggcgttcaggagcaagtagttggagcacagaaaagcgagaggatttcgcgaatgaccttgatggtccgcatcttattgcagtaacggcaagcagcaaccgctccaagggtgaccaggacccgtctacctggaagccaacccgttatagcgctcactgcgggtatgcaaagtggtggatcaatactaagtatgtctatgatctacaccttcagtcttcagagaaatctgctcttcaaagcatgttgaatacatgtagttattaagtctgtgatagttgatcgtatgataatttcgttatggcagttgaggaggtgtacttaaatggaacagaagtcgtcaatttttactgcaactcatggtgtaatgatcgaagaagtaggtgtgattagcggggagcttgaactgcgtacttcctgtgatgaggaaggcgatctcacgctgtgcatcacatatgtaggagcagaagagtggtacacgctacctgggaaagaatatcgcttacacgatgtccgtgaccatgaagtctttcaccgtttgcttgtagcagtgcttgagcgctcataaaattcgacaagtgacaggcactataataggggaggaggggtcaggtacgtacctgacccctcctcctttgtagagctttctgattttaaggcatattatgatgacgttcaagatgacctaagtaaaagtattgttaaggtagacacattagaacgattggacactaaagcgcatcgcgggaaaggttcgagaccaggatcaccttttgagcttgtttcctcaccgccgggacggttctcatgatgcaatatttcgaaaaaagttaaaaggagttaaataaagcctactcctaaacatctcccccttctgaaatgtgtccatttacttaaatcagtttcatgcacattgattttaggttagatttcaattaccataaagatgtattgaaaatacttctttaagaaactgattcatacacctgttcttttattcgtaatctactatcactgttaaagaagtgatctattaatttaaaaagtaagaagggtgtataaggactaaaaacattgccaacattaaatcagaaaggggttattacatgctgaacgaaaatacgattaagatcgtcaaatcaactgctccggtattgcaggaacatagccaggagatcggggaaagattctatgaattgttattttcacgcgttccagatctatacaacatgtttaaccaaacgaatcaaaaattaggtactcaacaaggagctcttgcgtacggtgtttatttagctggagccaatattgataatctagaagaaatcgagtcaatggtagagagagtgactgaaaaacaccgggcactaggtgtccagcctgaacaatacccgattgtaggggaaacgttgcttgaagcagttaaagatgttctaggcgatactgcaacagacgagattatcgatgcctggggggaagcttacacagctattgcagatattttcattgaaacagaagctaagctctacgaacaaacagagcagaaacgtggtggatggatcggaaatcgttctttctatgtcgatcgaaaggtgaaagaaagcgacattattacttctttttatttaaaaccggaggacggtggtcctatcccgtcttataaacctggtcagtatttgacgttagaagccaatatagagggcgaaaaatattctcatatgaggcattatagtttgtcagatgctcctaataaagattattaccgaattagtgttaaacgtgaggatgccgtaaacgatgcaccagccggaatagtatcaaactatcttcataatgatatttctgaaggtgacacattatctattgcagcaccagcaggggatttcacctatacaactgaagaccaaccgattgtgttgcttagtggaggtgtaggaattacaccgatgttgagcatgctgaatagcctggtcgaaaacggttccaatcgtgaaatcacgttcattcacgctgctcaaaatagcaaagtacatgcaataggggaacacgtagagaagttagcgaaagaaaatcagaacatttcttattatgtatgttattccgatccaactgaacaggatcgcgctgagcttcgctttgataaagaaggattgattgatttagattggcttaaatcggtcttaactgatcatcaaaaagacttttacttttgtggtccacttcccttcttgaaatcgataaatgaatcgcttaaagaatggggagtaccagcagagagacgtcattatgagttattcagtcctgttagtacaattgaggaagaatagcatcccaactaaaggtgtatagataagccattctaaagtggatcgtagatacattgaagggagagggatttatggaaacgaaagaaaatgaaaaagtcctccgcttgcaaacggtgcttgaggaagcattaaaaccgattacagcaaaattggaaacgttagaaaaagatgtgaaatctgttcaaaaagcacaagaagaattaaaaaagatggtgcaaaaagaaagataagctattattccgatcgaaaatacgctagttattcctgatataaatagataaatagtgcctgactccctatgggtgacaggcactatttatcatttgaataaaaggtgaagagaaagcattttttaatatgatgatggagaaaggaggacagttcatgaaaatatatacgattgggcattcaaatcactcaaaggaatattttctggacatgttgcgagatgctgacattaactacgtagcggacatccgagcattccccggaagccggaagcacccccaatataagagcgaaaatatgaaggaatggcttcaggaagcaaggatagaatacgaccactttcctcttctcggtgggagacgccgtcagtctagctctgttggggttgagttgaatgaaggctggaaaaatccttcatttcacaattacgctgattttacgttgacgaaagattttattgaaggattaaagaagcttaagacgcaggcgaagaaaatgaacgtggcctacatgtgttctgaacgtcatcccgccagatgtcatcgtttgctcgtcagtaattggttacaggcaaacaattgggaagttctccacatcattgatgattctaaaaagacaacaaagctagttaagcatgaacttggaaagtggggggctatgccaataattgaagaggatggtaccgtagtgtatccaagtttatatgaataaagatcacttcattactgcaagatagtaggctccttttctctcattgaaagggaaatcgagcctaaccataagaaaacctccacggaaagaagaaggataacaatccaactccataggaatataaaatgttgttgaatctgatcgattaaagctatcgagctttgtcgctcgggcaatgcgattgaaaaagcgtaaaacattccaaacgtaaagttcctcgaccactgactcacatcatacgtgaataacccttttctccaaccgtatgcttggactcttttgactgctcttacgatttcaatcgtctcaacgctaagcaagataagaagaaccgctaaccacaaaaggagaaggccagttgctgacaaagcctgagtggacacgagtgccaatccagtgatcgataatgctccgtgaagaatgcagtttgtattcttccaatcgtttttcaatgaccagtttcttccgcacaaataacgtaagcttagacaccaaactccacatagatagaaaagcccacctaaaaccacaccgaataatagaacctcaagaggtaaggaaaacatcttcgcccatgtaacgaccagagcttgagtcgtcacagttgatagcaaaataattccatgtatagaagagatgaattgttctttcaatagagagtaaaaatgaataaggctaccgcctaagaacaggaagcatagaaatgtatttaaaatgacaagtacctgaatgacgtgaaacgattcaggaaaatactttaacgttacctgacagagaacaaatatccctgcaacccacgtccccatcataaaaaaacgaacgggatggtggaggaccatgtctctccattctctgcgagaaaactgtttcactaatgaaaataataagccgacactaattagccaaacgctaatgagtaacatcccaccaacattctgtgcaatgagagggaaagcctcgacgtctgcataaaggaaaatccccagtgccattagtattgcgcctgatgcaggatgaatttctcttctctttatatttgctttcataaaaatcactcgcttcttattgatcacgagttccatgatatagcttattggcttatttaaaaagacttttttcttaagcatcgcgggtaagcatcgcggagacggttctcatgactcaatgtttcgtaaataatgtgaaaaggagcattaattattccacaattaatgctccttttatttatgagttggaatcaacagaaccgtcccggcgatgcacagcgtttgctcgtagcggcgcttgaacgctcataaaattcgacaagtgacaggcaccagaagaaccacagaagagagaaccagaatatgtaatgataaataaatgccctgcttggaccaggcagggcatttttggtgtgctcaaacttcttcctctttcgtggcagacgattcatcagaaagtcaatcagcaggaccattcctcgattccaagtacttgtagggtggaaacagattcatgcgattcctacttatttgttaggatccggaggtgtgccatgaatgtagcttggtgctggtgtaagttggggtgcttgtcctgaaggtttaggattagagtcgaatgagaattccccttttccgtccattgatggtccacttgcccaacgacctagcttactttcatcacccgcagaacaattgataaatttataagagacatcctgtagttcatattccctgttgaacgttgaaggaacgaccaatccttctttttcttctatttcagcaatagcagcagcccactgattctgatgcatggtatctcgtgctataagaaacgaaagcatatctctcacaccagcatcatcagtcatttcatataatcgaacgacttgaagtctgccttgactttcagcatttaaattagcgcgaaagtcagtcagtaagttgccgcttgaaatggtgtagcgagcactccaaggatagccaacactgtcattcggacttgcccctaaaccattaacaatcgcatgttgcggattcattccccccataatgcttttaataacgggatctttcgcagcattttcttgttcctcaacaggcgcactgtctagtaactgtgcaatcatggtggctaacatctcaacatgagcgatttcttccgttcctatatcaagtagcatgtctcggtatttttgctctcctcgacaattccatccttgaaataaatactgcatcattacggatatttcaccatattgaccacccagtacttcttgaagtttttttgcatacacaggatctggtcggtctggtttggcgcgatattgaagttctttcacatggaaaaacattaaacgattacctcttttcgattttatatacgaaatggtatagatgaattggaatcattcacttcgttaaaagtacttttttatcttgtttcattttgattatattattctatatagaataaaagaggttcaaacgagtggcttgtccgggatttttgaatttgttatttcaccattattatcaaaataataaaatgaatgcttggtacccaaagtaaatagcaaacccgatgaggcttaaactggacaagattgaaattattttaagtacctgatcgtttagtacctttccgaaactactagataatgttgccatggtaatatcccatatcattaatccgagtataattgcgcctccgtacatgactaaatggagataatcataacggttaattgtatttgctaaaactgacccatatatacctaaccaaaaaaggatagaaaggggattagtaatggataataggaaaccactcataaatgttttacttaaggaatctttatttcttaccggctcagttatttgagtggagcttcctaaattttcgaatgcggtatagaaaaggacaaatgaaccaaaaagccacaaaaacgttttcattaaggggatttctaaaaagtggacaactccaaaaaataccccaagaataaaacaaagatccgcaacaatagaacctaatccaattaaccatgaatgaaaaaaaccattcttaattccttgattaatttgagcagcattaattggtccaataggggcggctaatgataaaccaagaaagatataactaagaaatatacccaaagaatttcactcccttttatcagcttgtacccatcatattcgtggcaataaaatttatgtacaagttgacaatagaaagaaacacattgcgaaacatgcaatgtgttttagtatcaggtagtagcttggtttgtttcctcgagcaaccgtaacaaatcagttgctctttgaatttctttattatcctctttgtcattagattgcattatctcatttaatgcttcctctgctaattttatatactgttgtgcttctgaatatcctgtgtcattctgttgattacgttcaacagctaatctggcgttatttaattgttcatgtaaatactccatttgatgagtcatctcatacctccaatttgtttactatatgaggatactaaaatttttagttatcaagcatatttaattctattctcctttttctcccctgggtttataaagaaaagtacgataagaaaagcaactagactgattccacccgagagataaaagacaagatgatccgatatagacataactgaagcatagaccggagggccagctgcaactcctataaatctcatggcactataaaaagaggtaatcgtaccacgttcttcttttttgattccttctgtaattaaagcatcaagacatggaagtgctgccccaattccgattccgctgaatacgaggaacagcagtaaaaagagaaaagagtgttgtaatcttaaggcaacaaatgaaagagctaaaatcatcatgcctccagcgatgacatatttcatcatttttttctgttgtccaatttttttccctgaaacaaaagaacttattgatagaaaaagcagagggattgcaagaaagactccctttttaacccctttgatttgatggtacttttccagagtgtctgaaagataaaagagcactccaaataagacaaacataataatacatccaatcataaaaatagcgaaaagccatttcccttttttcgcaaacgtatctctaacacatttgatgaattcagcaacagattgttgtttggtgtcttgttcaggaattttcactaagaaaagaacaagcaaaacactaattaaactaaaaaatgggataaaccaaaacggtaagtaccatatgaaagatgccaacgtagcacctataatcggacttaatacctttcctatggtattcgaggtttcaatagtgcctaacccagccgtaatctctttatccttactaaacatatcaccaattagagggataacaactggtgcagccccagcggatcctattccttgtaaaactcttcccaccagaatcatgttaaaaggatcgttcatttgccaagaagcccaacctgatacgccccccccaattcctgctataaccagacatggtatcataatcacttttctgccgaaacgatctgataagtatccagcaataggaattaatacaatggctacaattgaatagaccgtaataattaatgaaacctgaaatgatgatattcttagtttcttttcaattaagggtaatactgggattagcattgaattgcccagtgtcataacaagtggaacagatgaaactgctaataagtcgaatgtctttctttttttacccaattttaatcccctttttagggtttttcatgtcagtagctcactgtagaacccgtcagtattttagtattgatcctttggggattgaatattcattcgctgttaggaaattggggtgaatatttaatggatcttatagcaaattaaataagcaactaaaggagaatttcataaaaaatttaatagtgaggtgggtaatgagatgtcaaaaaaaaagagcgatcaagtgagcacagaggatgcgatcatactgatgtttttatcattagtagaagatgatggaatcgaagtccctgtaacgttaaatgtaagtggcgtcattgtttctggtctattaattggtgcgtctacttattatgaagaaattactgaagcagtcaaacaaagcgccgatgatacattgtcaaagattattggaaagaaatttactgtcttgaaggaagggtatttaaaacaagttgaggagagtaaggaggatgaggagacccctgcgtctttcattcacttaaaagacattactttcccgggtgttgaagtggataaccgtccaaactggtggagaggaagaatttcttcagtcgacgccatttcctttgacccaactcatttggggtgaatatgtgttccactaatatttgagcaaggagcaaataaatgagtaaaaataggaatgcatctaatacaacatcaaaagataaggaagatttggaatggtggcagttagcgctaattggagtcggctgtacaattggaacaggttattttttaggttctacgataggtattaaaattacaggatcttccatcgttttatcatttatccttgcagccgtaggtacttatatcgtctttaacattttagcgaaaatgacagcggctgatccgcaaaaaggttctttttgctattatgctggcaaagcatacggaagatgggcgagctttagttgtgggtggaattactggttttcaaacatattgattatgggcagtcaattaattgcccttgctctcctctctcgtttttggtttcctcatattccactttgggtttttgcgtctggttatgcggtcctttctgttttgatcgtaatgacaggcgccaaaggtttcgataagattgagaatgtgcttgctattatcaaatttgcggcgatagtgatgtttattattcttgcaattgccggtttatttggatggatcgatgggggagaaggatcaactcaattgtcaccggagaaaactgaactttttgctaagggatttcaaggtttttgggcttcactaatctatgctttctatgcttttggaggtattgaagtaatcggaatcatggccctgcaattgcataagaaagaagatgctcctaaagctgggaaaatcatgatgatcagcttaacgatcgtgtatgtagtatcccttgtacttgccgtttcaatggttgcgctagattccttccaattaaatgaaagtccttttgtaactgctttagcagcatatgatcttgctttcttcccgcacgttttcaatggggcaattattatcgctggtttttccacaatgaccgcagcgttatatggcgtaacgaatttgctacaggctttagctgaagagggagatgctcctttattgtttgctaaaaagagtgagaagttcaaggaattaccactcgcttctatgggacttgctacaagtggtttagtggcctcaattgttacagcactactgcttccagaaaaaacttatgagtacatcacaactgctgctggaattttacttttatacaattggttttttattatttcatgctcttttcgcatcctaaactataagatcaggaataaagtagttgcctacttaggtcttttattaattttgggtgccatcagcggcaccctcgtaaaaagtgagcttcgtccaggcttctgggtaagttttgtttttatcgctattattgcacttgtatgcttaagactaaggaaaacatggaaaaagaacagcagttcgatcaaatattattaagtagaaacacattcctaacaagaaaaattcgttctatttccctggggatatgttcgtaagattaatttcttaggatacctcttctcccccgattttagtggtttcttcaatgaggggtcaggcacgtacctgacccctcctcctcaaccatgcatcccaccaaccagccagctcttagctcgatgaaacccaataggaacttgtataatcgtcgttttctgtgcatcctccagttcgtaaatctcatcacatctattgatatcaaatccaagcagaggatgaccattcataccaagtgaggtagctgctaacaataatcgctgaagaagcatccccgcttccatgtgctgaatgcgatatcctctgtagccaaggtcagttatgtggtgtgtgcggtctccgacgatatggagacagatcggtacttgatgtagattgacgttgtgaagagacattccggcctggagagtaaaacgaaagtcacccttttttataaggaggagggaatgggaattggcgtcataccgataggccccatccggaatgccagcaacctgataaaagcacccgtaaatggagacccgtggcgattggttttcttctttatctaaatcgttagcgtatcggtaggaattagcgctttccttcagaagggaagcgagctggacatgatcgattcgttgtgcgttaaaatctatttctggtgaatagcgattccgacaaacgtgagcgaagtctttggatcgctcctttggttcaggtaatgcgatctttcgcttgttttcgaatatctcttcatttttcttaatacctcggattaagccggtagattcaagcaacgtggcatgatgaagctgtgcgatttcaggaaacggtaagacgttttgtgaacgttcataatgcgtcgttgtgatgttgggtatttctttcaccaattctgctgctgagcattctcccggcggctcctcatgcacgactttatggtctgaaagcgggataattgcataggtgctttcttccagaccgtccagccccagcaggtgattgatggattgatccaagaattgaaaatgaacctttggataaaagcgaaaacacttactaacctctaacagctgaccaattagcgcgccagcatccaacccttgaagacgatacgaaaagttatggtatttaaagaagtttttccaaaacattgtagtgatgatgacagccccaaaacaattggaaagggaagagctatttcctagtgcactggttaagtaggaatcaaaattgccctttctgagcaagagaaggcgatgatgagcgacatcgtaatggtaaattccgctcggcagttcctctagcttgagataaaaataaagctcacttggatataagccgccacccgaaggcgggaagcggcggaatccttgcatcgtttcagctaattcttcgtctgaggaagagggataagctgtctgattaaactgcgacagcccatacacataccaaagaaaatgtccgaggttatttaggtcaggtattgggcaaggggtccgatcttgaattgtaagtggaatatcgtaaggaagtcgatactcgggtaagtgacgatacaccttaaatggaaggggagcatcgtcccagttcacttcccagttttgcggcgtgacaagctcattttggaaatgcagctggtgtaaaaacaggtcgagatccatgacatacctccttgccacgttaaggaaatggatgcggataagggttaagctcctcaaccgttaagtctcgatcaacaaaaccgagttcttttggaacctttactactctgcttaagccggtgacgcgtcttaggtgatggccaaatgtcatcggcagcatgccaggaatgattacttttgcgcagtggagtccgttccgttttatttctggtgttgtttggtccactacgattacatctaagtttaaactacgaaaggtttgtaacaggttattcagatcctctgtaagatcatcatgaggctttgctggttgaaatgcctcttggaatgtttgcaacggtcggttttgatttagtaaaaagtgaaggcgttcctcagcttcaggaagtccgtaaaccatgccatgatcatccattttcttgacgagcgaagaatcatgatacatggctagaaattcgtctttcttcttcttgaattctttatttaatggtgtgatcatgccaacactttcaaagatggcgcttttcacagcgcgaacgggatcaagatgagcgcctgctgcacacatcaggtttaagcgatcagtatcagaggtgcggttcttcgtaatcgttaagatgcaaggaatgccgtgttccatcgtggcattgtataaataaagatcatagcccgtaatctcctgcattcggtcgatcatcaagtggagctcttcgtcgtttgacgagtaaggatcaatctgcggtagcgagagcttggcgtaccaggttatgagaaaagagtcgcgttcaagcacttccatcatgccgtagaagatggcttcctcaagacttcctccgatcgcacagccgtttgatgtttcaaacacaaacccatccccgcagcccatgctgtaatacgcgagacgctcaggaacgagaataggctggttttcaatgagtgagtaaccccatacccagttcatttttcgatccggatgaaacggagtgaaagggtaaccctgttctgcatactgttcatcggcatgaacgccgagcttaagaggattcaaggcacgatccaggttacgataggaattgtgaacaacggttctttttcctttcggatcaatcccacacgagcgttccattccttccaatatggcggtcatttcactcatcgcatacgatgttgttcttcctgccgagccttcatttccattgaagagggggaggttcacgattgcatcggcgtatgttgtttcaaaatcgatcatgagacgatttaaaaggcccgtgcgtggatcaagataatcttttgagaggacgttgcgtaagtcgtttatcgatcgagtgcgatagccgctgacttttatacttggttttagcgtaatcactgcttccgcgtccgtgtcttctggaagagaactgcaaacggaacagtaggcgtctggcaaaattcgatggcgagagcactcaagagaacccatgtttagtaagtggatagccccttctaattgagctgagcccagcacttcatttttgatcagctgagccatttgcagaaggccggtttgtgagctccattgatcctctatcccgttatccctttgggttaacacctgctgaattttccatagatcttcacggtcgtttgctgccatcatttttctcgtatcggcacactgtgaacagcctgccatactagggcgaacgagtggaccgatcaccccttcgccaaaggataagaaagcgcgtagccacttgatgccgagctctcgtgctatttcttcggcttgtttgtggatggttggattccagcaatcatgaatgacgagtaacagcgatgtctcctcaggtatcgccccttctaaatctgggagaagcgtgaggtggcggggagcgagttgttcggctacgcaatctcgcagcaaaccatttccaactaaggtaatgctagtgctcacctcgtctccccctctcttaacagcacgccatagatgtctatgggtccatctttttcaaatgtttcaagatttatttttacaatcgaaagttccttgttttgttgtccgaaacggtttatgacagaacggagaacatcagcctggtcgtttgcatcataagcaggaatgtcaatggattggatcggtttatctttaaccggaatcgctgaaaaagagagagctgccgaaatggaatcgttttgagcttctttcacggcctgtaggagcgcacttcgtaaagcgagcacgagagtaaatccgacgcttccgtaccagcggttatcttctgcttttctccatacgacaggaaggccgttcgtctcttttcctaaggcgagatcaggtgcttttttcatggttgataaaactttcaaatagtagcgacagagattgtcttccacatgttgaacggcaaatctcgataggttttccatgcattgatccgctttctgattccattcctcttctatcattgtttgcagtgcccggctaacagcctctacgaatgactctccagcaccaatgtggagatcggttggtaagtacgtagccttttcgaaaggagaggaaagtgacgaggtaatctcctcttttaatgggataacgtactcttcaattccagtcaagccggcatcccgccttgcttcttcgtgtgttaaagctgtgcttatctggctcggatgtagcatagaggatccggatggtttgacgttaaccgtctgaatctcacattgagctaaaggtaattgactcagctcgccttcttcccacttgtgaaaaatgcctaactggctggttaactgactgaaatagtaaaggagtttgttcggatcttttttcttctcttcactaaattctttggagacattttcgacttcgatctttcctgatacgagtggatgtgggcgatagggatgccatttgccctcaagggtttcaaagttaagcagaaatacctgattgttcgaaagcgcagggaggcctgtgctctttttaaaccattcaaatacgatcacattcgctagcattgctccagccgtcggtgaaaatgagcgattgtttagcgattcaagatgtaagctccgccacgcagattcccagcagccgccatccggcgtaacgagaggaccggccattccaactcctttcgtgcagatggcggggagaaacgtttttttcctttctttacaggcatgaaggagactgcgtagctcctgcacattttcttcggaagacacatataaaattgcgtcgaatggttcgatctgcctctcccaggcgatcggccctctctttaacaaaacttcaatcgagacttcaggatctgactttcttgcagctgtttctaattgtttgattcgttgttggctcgtctttgcatctgtaagtagggtctggaaacgaggcaaaccagatgtaagtaatgatgaaaccagcccaattaacatggatccttctccaacaaccagaacgtttttctgacggtattgctgaaaccgataagctccagaatcagtaaagctttcgatgtattcaatctgtgaagcatatttctgcacgacatttggttccaactggtggggacggtctcgactaatgtcacgaagaaacccattcgtaaaaagggtatcggtaatctcgtaaacccgatcacgatagggctttgatagtccatctgtgagggttgctagcgaatattctccgttatacatcgggatcagcttttcgatccattgataaatcgtgttaccttccattcgaaatgaacctgaattgttcctgaaataaacgcttccactcggctccggcatgaaaaaactgcccttctttagctttaaacgcatggaaggatgaacattcgtcataagacacctcctgatccatagttctgacttcatactataagtctatgttcagcgctttgtctcatatgtgtggacaaaagcaagatccctttaggagttaacttgaaagggttatgagatggatatttatgttaaaattgatgaaggaatgatgaagtaattcctgaaaagggcagcattaatgtaataaggtgtatatagaatgaggtataaaatgaacaatcgttggaatgaattgatatataaaatttggtctcctatttatgataagcttttcaacaccggacaatttctcaaagcacggaaagagatttttagaaaaactgattttgttaatgaccaaaagatactttttgttggagtaggaactggggcagatttagaactgattgaacataatgaattagatatcacagcaatagactactctgataatatgcttaaaaaggcaagagcaaaattcaaaggctcaacagtacaatttttaaagatggacgctcaagatatggattttagtgatagatattttgatgtagttatcggaagtctcatattatcagttgttccagatgctgaaaaatgtcttaaagagatgttgagagttttaaaaccaaatggggaaattatcatctttgataaattcatacaaaaagataaaggactttctccgtttaaaaaagcaataagaccgctaataaaattattaggtactgatataggaattgattttgaaaagttgtataggaaaaatcaagacgtttttactgttaaggaagaaagtccaataatgtttaatggtatgtacagaaagattatcatcagcaaaattgaatattaattgtcttccgttaaatctgagcgattgattagtaaggtgtcgattccttaattatataaaaaagcttctcctatgaactaatagaagaagcttttatattaaaaggttaaatttctgttttataggatttgcctagtaagggggccaggatcacaggttttataacttttataatatgaggaagcgattaccattaagtaacaaaatattcatttagtgcctgctgtaacgttccaagtgtttttgttttttcatttaacatattaccgagattcgtaactttcctgacaactgctttccttaatccagttatgacggtgttacaccccatcagtgaggcaccatcaataatttgaatcaatcggtaaacatcatcggtactgatatctgctactccagataggtccataatcaatgtttggatacgcatttcgcttattgcggttaacaccttatcctcaaggatttccgttctttgagcatcaattgctccgattaaagggaggatgcttaccgagtggttaatgggtataattggcacggacagatttttaactagttctttttgagcgtttataagtgaatccttatatttcgtataacttatgaagaaggaatttaaaaagtagtctactcggttgttaatttgtttttccatttcaaagaaattgtaactcttattattacttttcgattcagcgtatttttgaaaaaatacccacaatgttcgacgtatagcttgtacccactctaatttaaaagagatagcaagagaatgggttgcccaggcaattccttcttgttctgcaaaagtatgaagttcctgatccttttcttcaatgatataaacaacgagtgtatgagcatttgcaacaagatcgatattccctactctaagtatttcttcaatcttatccttaacggtgacagcttcttttagaagcgtttctgtaaagacttggctatttgcttcgaagaattctataaattgataagaatcttgatacgtaaatgtttgcaattgcctctcctcctttatttataaactagtcatgttaattataaaacaagtctcatttttattcattaccttttccaatgcttctcattatgcaaaaaattatttattaccttttttggaatgcacagatttgaacaggtgagctttttggagaaggcgtcattctcacgttaatccagcttgatggacgtggtattatgacgtttacattgtttatcttcatgattatctgaaggaaaataggtttagccgccttgagaatggttggggctattctaactgatacattagctgaagaagaaaaactggaaatcgcttaattcacacatagaaatgaagtgtttttctataccaaaataaaccaccgaagaggcgatggcttatttcggaatttcataaaggtaatgctaaaggtattctacttcgcattttcatctggttgatggacgccaaagatatttccttcagtatccttatagtatccctgccatgccatccccggcagtgcgtatttaggcaatgcgaccacaccgcccttatcaagaatttttgcttcaatcgtatcgtaatcttctacccccatcgtacaggcatagccgtttacaggctgatttggttctgggggtggaccttgacgctgcatgagtgccccgttaatgccaggctgatcgtcaccgccagtcacaacgccaaaataaggcatgccagcgaaatcgctccagtcttcataagtccatccaaatacttcaccatagaaactttttgcgcggtccatgtcatcgacgtgaatttcgaaatgcactaatctccccatgattccctcctgaatttaaaaatatttcatttcaccatgtattttctacaaatctaataagcagtccttctttaagatggaatgaaagaaaataataaggcctttgaacatctaacgaagaggttggttgggaggaggatcctttgattttatcgaatcattagaagggggagattctgaagataggtggggcctttaagatcaagaactttcaatatagaggagcatttacggaaaaatcaatattaggtgggttaacaatgattcatgaacttaatcaagctgaattctacaaatgcgaaaggctactaaatgatgtcggacatctagaaacgaaagcggtcatagaagggaataaccctgggcgcgtttttgttgatcatctcgatgcccctaaagcaggactgatctggttaggcaatcatgacggctttttctttattggagatgaagaaaatgagttgtttcatcacgagatcaatgattttattgatacgataattattcctgaagcaagacagctaaacttaaccaattttatcgtaattggcaaccattcaagatgggataagacaattgaaaagttctttgcccatcgtcacatgcagaaatttaatcaaaatgtttatcgacttgaacatcataaagagcatgatgaacctccaattaaacaagattatcacgtcataaaaatcacgatagacctttttctgaatcagaacaattctattgaaaatatagggtttttgcattcaaaaatagcagagttttggtcttcttccgaggattatttcgataagggaattgggtacggtgttatctatcagaataagattgtgagtttatgtttttcagggtttgtagctggaaatgttcacgggttagatatggaaacattggaggagcatcaggggaataaattaggtcagaaggcagcttctagtgttgtggatgaatgtgtaagtaagggaatgattccatactgggactgtgaagaggcaaataaaccatcgaatgccattgcgaaaaagataggattagagaaatccttttcttaccacgtgtatatttttccgattgataactagaggtgttttataacaagaaatcaagtgaatttattaagaggtgagggtatgctttctttacataaagttcgaaaagaagaagcgactatattgcataatatcatgcaattttatttttatgagtttagtaaatatttatcagatatgaagttaggggataatggagcttataagcgtattcagttagataagtattggcgtgatgagcactatcacgcttattttattaaactaggtgatgaattgattggatttgctcttgtagaaagtgctactatttcaagtccaaactcaattcaggaattctttattattgctaaatataaaggtaatggatatggaaaagaaatggcgagaaaactgtttacgatgttcccaggtgaatgggagatcacccagatagaaaagaataaacctgcacatgctttttggaaaggattaattaaggaagtaagtgcaggtaattatgtggaatataataaaaatggtgtatatgtacagaaatttaatgtttagatttttagaataaaagagtttaaagggaaaacactcttacagaatcccatgaaaaaaggggtgtgatatgtgaaaaacagagagaataggaagcgtaaaacgatacagtggattggttttagtatcgttatattcgcttttctagtcaatttggtcctgtatgtgactggcatttctagtaacttatcaatcagcacactcgatggaatgaaatggattggaatagggggaggtagtgttgtcgtattggcgtcctacttcattcctgaaacgaaatgatctttcagtatagagaatcttatttgcaaaaagagagtaatgaagaaaggatccatgataggtgtgaaaaactaagatttcataaatagtttaatacctctggggatgatttttggtggagggatcggtgtggtttttgagttttcaatagccttgggagcaggaattggtctggtacttggagcgatcgtatatgctttttatagtcaaaaacaatgaaacgctaataaacaatagtcgaggggctaactggagtagttgttggaaactacgattctaaataagaggtgaagaccattggaaacggaaattagttttagaatggcgactgaagaagatttagttgagattgttgcgatgcttgcagatgatgttttgggcaatcaacgagagcgtaatgaagatccacttcctgaaagttacataaaagcatttcatgcgattaccgctgatccatacaacgagttaatcgtagcgtgtcatggtaagaaagttgttggcgtacaacaacttacgatcacgccatacatcacccatcaaggtgggtggagagctactattgaaggagtgagaaccgcagcttctgtgagagggctgggtgtaggtacaaaactgataaactggtccattcaacgtgcaaaagaacatggctgccatgttatccaactcacaacagataaaacaagaccagatgctttaaggttttatgagcggatagggtttaaagcaacgcatgaaggcttgaagttaaagctttgactacaagttctcgtaccgaagattttaacttatatcaaggtgggataaaaagttgagttataaaaaagtaaatacaaccgtgtttgctcttgaaagcggtggaggtaatccttgcccggttattttacatgcagaccagtttaagacaggtgaaatgcaaaagttagcgaaggagttggggcatgagacggcattcgttttaaaaccaactcggtctgattgtgatgtgaagttccgtttctttgttccattgcatgagatggaaatgtgcatccatgcaacgataggaagcatcaccgtactcataaaacagggcatgatcaatcattcgccagtcatcgtagaaacgatattagggccaattaaagtcgagtggacatctagagaaaccattgatgttagcgtggaacaattcctacctgaattcaaggatgtgaatctaacgaaagaggaaatcagtaacgcgttacatatcgaaatcgagcaaattggggacactcctattcaatctgtctcaacctcccgtcataagctcatcattccattaaaaaacgttgaaatccttaatcagctaaagccagattttgaaactctttggaagttatgtgatgacgtgggtacttctggtttttacccgtttgcgattgatgagaatggcaatgtccacgcacgtcaatttccaaaaagagctggttataacgaagatccagcaactggcgtagccgcttctgcgttaggcgcctatttatcagcccatcaagtatttgggcattctggtgatggatggcaaagttatcgtgtgattcagggagtggcgatggggcgtccgagtgtcattcggtctgaggtatttgttgaagataatgagattaggagaacacgaattaaagggagcgcaatagtagacagttagttgagaaaatagacttcttagggggagatttatttggtatcgatcagaactatgaccaactctgacattgatcaagtttctatgctaatctcagagtttaacacgaacgaggaatcgtatattggttattgcggaacagaggttcaagagattgctaactcctttatagaagatgtaacggatgttccgtatactgagagttttgtcgtagcttatgaggaaggtgagttagttggtgtcttaggttttgatgcttctctggaaaacaattgtgctgaaatttgggggccttttgtgaaaaaaactgaatgggtcaatcagttgtgggctgaaatggagaagttactacctcctgaaatacataatctcagtatgttcacaagtaatcagaatcgacgtctactaagtttcgctaaggaattgggatttgttaaacaaagcgagcaaaccatattaacagtttctcgagtggatagacatcaaataaaagatgaaccgattgtggaactaaccgaagagtacttctcagagataaaacaattacataatgagtcttttccagagacgtattataactggcaacaattgatcgatcgccttagtccgaatcgaaaagtgtttattgttaaagaatccaatcagctaaaaggatacatctatgtggagggtgaaccagcgtttggagaggctagcattgaatatatggccgttaaagacttggaacgaggtaaggggtttgggaagcagctgataaatggtgccattcaatggcttttttcttgtgaggatattgctataattacgctttgtgttaactcaactaatgaaaaggccataaaattatacaagaaggttggttttgagcgaagatacgatttggtttttttacaaaagaaatggtagtcgaatgataaaaaacttatcgatgagtcaacatttatagaacctggagctgcatagcatccaggttctttttcatgtaatgatctatgtgattgaacatgaattttttttttttaaaacgatcagagtgtaagacctcatcaagttcagcgaccaccgcaacgaccgcaaccgccacatccaccacatcttgcagcacaaccaccgcagccagcacatcgcgcacagcgagcgcacccaccacagccagcacaaccgccgcaacccgcacagccagcacagcctacgcaacccgcacagcggaaacacccaaagcatacaaatccaattaaacgagtatcattcggatctacattctggtctccatttggataatagttcgcttgctcacaaggaactaactcctgggcatggtactctccaacatctaagtgttgaagatcgttttgaaattgattcatttctgtcacctccatcaaacgttcatcatggactgaaatccattttcctaagcgcttacctcatgaaacactttctccaacaaactatgtagttgggctgggtaatgttcctaggtcgagagcggaagataacggtacgaactggggagagaggaatatgtatgcctgatttcacaggagatgattttaggaagatcaaaaggagtgctaatgattcaatccattagcactccttttctatatgagatggaatcaacagagccatttcggctattctgagtcattcctaaaagataagggagttcccctcccatgatagggaagttccctgattaccaaattcttctcacctttctataatgaaagtaacaagtaacttgcggggggaatccatatggcagaatctgtacttcgaaaaccagccaaaactatacgttcattcaatcatgcatttgcttcaaaatttgcgaaatccatgttttttacgataagtggcttagtcatcctatcgtttattgcgacgagaatgttcacacacgtcgatttaaatctttacggatacatggtgggaacgttcgtgtttatcggtggattcttctatcgcttcattgcttggggggaaagacctccaacaaaaatcatcataaaaaaggggatcaagctgctcggccgcaagtcaacgccaaaaacatctgttgagcatcttggtacatatcagtttatctggaatcggggaatttaccgatggacacaacatcttctgcttggctggggtgtcattctatcctgctttgtcacgtttccgctcgtgtttggatggatgtacttcacgatggaggaaggcggttattataccgtcgttggaatgggcatcaatttaatgactgtcaatgcagatggaattcttgctttcttcttttacaatgcgttgaactttacagcgatcatggtgatcacgggtgtgtgcatggcgctttatcgtcgcttaaaaaatatgcaggctagagcggaacagaactttatgtatgactttctaccactctatcttttgttgtttattagtgtaacaggtcttctcctaacgtttatgaacgtgtttttacatggtcagggacattacgttatgtcactcattcatcagtattctgtcatcattacgctcatttacttaccgtttggaaagcttgcgcatattccatttcgaccgcttagtgtgtttgctcgtaattaccgtgaacattatgcagagcagtcgatgaaagaatgtaaggtttgtggtgaaggttttgtttctactgaacaatcaaaagatgtcatcgatgtgctgaatacaaatgacattactttcaatatggaggatggttttcatcttgctgaattgtgccttccatgtcgaaggaaatatcgcatcgcacgattttcaggatttgcgacgcaccaagtgaaaacgaaggaggctaatcaggatgcaaagggataaattttttcgagatatcgaaaatgtcactcacccaaatgaaaaattagttaaaacccattgtagctattgcggcatgcagtgtggaatgaacttaagggtgaatacgatcagtaacaaaatcatcggtgtcgaacctcgttatgattggccagtaacggttgggaaaatgtgtccaaaaggggtaacggcttatcagcaaacgaatcacccggatcggatccttcgtccgctcattcgcgatgatgcctcattgaaaggaacgaaagaagggttcagagaagcgagctgggaggaagcgtatcagctcattgctaagaaattcggtgagctgcaagcggaatatggcaaagatagtttgtccgtattcagtggtgtctccatgacaaatgaaaaatgctatttaaccggaaagtttgcgagggttgcgcttggtacacgctacattgattataatggtcggttttgtatgtcgagtgcagcaggtggtttcttacgctcatttggagtagatcgtggttcgacattgccgtggacggatattcatgaaacagattgcctgttcattgctggaagtaatacagctgaatgtcatcccacttccatgttccgcgtatggaatgtccaggagcgtgggggttacatcatcgtcgttgatcctcgtgaaacgcctctcgctagaagagcggatgtgcaccttgatctaaaaccaggaacggaccttgcgcttgcgaatgggatcttgcacctccttattgaaaacggctatgcagatgaagcgtttgtgagcgatcatacaaacgggtttgaagaaacaaggaaagtagtaaaagaattcacccctgactatacaagcttattgacgggtgtctcgcctgaaaaaatcattaaggcagctgaaatttatggtaaggcaccaaatgcgatcgtcatgtttgcgcgtggtatcgaacaacagcataaaggtgtcgataacgtttctgcctacacgaacatggctcttgttactggtaaaattggtcgaccaaagtccggtgtggcaacgttcacaggacaaggaaatggtcaaggtggacgagagcacggacaaaaatcggatcttttacctggctatcgtaaaatcacgaaccctgaacatgtgaaagctgtttcgaaagtgtggggaattaaccctgaagaaatgccgaagccaggtgtatcagcatatgagatgttcgagttaatggatcaaaaaacgattcgaggactatatcttctgtgttcgaacccggctgtatctgcaccgaatttgaattttgttcgaaaagcgatgaagaatcttgatttcatggtttgcggtgacttctacttgtcagaatccgcagagttcgccgatgtcattcttccatctgttacgtgggcagaagatgaaggaacggttacgaacattgaaggtcgtattatcaaaatcaatcaggctcagaagccaattggtgagtcaaagccagattggttaatgcaagtggaacttgctgaacatctagggaaagggaagtatttttcacatctgaaaacagctcgtaatgtggcggatgagttcagattagccacaaagggtggaaacgctgattactacggtgcgacatgggataagatcgatcaacaggatggtgtgttctggccatgtaaagatgaagaggacaaaggaacaccgcatatgttccttgataagaaattctatcatccagatggaaaagcaaagatttgtgcgcttccctatcgtccgcctgcagaagagccttgtgataaatatccactccgtctaacaacaggtcgtgtcgtctaccattacttatctggaaatcagacgcgccgcatccaatttctgaatgacatgtgtccagagccatatgtagaagtacatccagacacggctcatgagtacgaaattgaacatgatgaaaaggtttgtctatatacaagacgaggagaaaccgtctacaaagtaaaagtgacagaagccattcgaaaagacaccgtctttgttccctatcactttggtcatgatgagtcgattaatttgctgacgatcgcagctctcgatccaatgtcaagaatgcctgaatttaaagcatgtgctgctcaaatgcagaaactacctagtaagaaggtgttgtaaatgaagaagcgactgtacatcgaattagaaaactgtatcggctgtcgttcttgccttgctgcgtgtacgcaatgcggggggcatgagcagcggaatcggaactatgtatatgacgtcaatccgcatgtgaacagccaaacaatgccccttatgtgcttgcactgtgaaaatccagcctgtgcaagaagctgtccggctcaagcgattcaaattcatgaatcaggtgctgttctttcggcattagttgagaaatgcattggatgtcagaattgtacaattgcctgtccgtatggaattccgaagtttgatgaagaacagaatctaatgtataagtgtgatctttgtatcgatcgaacgaaagatggtattccaccaatgtgtgcgagcgtctgtccttccaacacactccagtggttaacggaaggtgagatcgagaaaaaacaacagcagcacaatcttgataacggaaaatgggttacaagcatgccttatttagaaggtgcaacgaatgtgaaagtgaacctgcctggtattttacagggaacagagaaactcttttagggagaggatttagtatgtcagatcgaaacaatcgtgtgccattcgatgaagataattacacacataatattaatcggaataatgaacggatgctcgatcgaagagggtttatgaagacacttgcaggggcggctggcgtgtttgccatctcctcgcttccgtggggagcggttgcggctaaggaattattagggcttggcgaaaaagagtacccacatcagaaaatcgtgaacgttaaagacatcgcggtcggtgattcggtagacttcacttttccaagtgaacatgatagcgcaattttaattcgtttgagcgagaaaaagtatgtcgcttaccagaatgcgtgtactcacttgaggtgcccagtctattggatgaaggaagaaaaagaaatggtttgtccatgtcatcacggcaagtttgatgccgggacgggggcgccaactgcagggccacctagacgaccgcttcctgggattcaagtagaagtgaaaaatggcggagtctacgctgtcaaggtgaagcgatatgaagcgtagttatgtaggcgttttattactttgtaccatcctacttttgaatattgtttttacgcagttaatggttcaccagttttactatgaaaattactctaccacactagtattcggtgggctgaacattctattatttccaattgcgctcctcatttataaaaaggaaaaacataaaggaggcactcatgggcatgaacaatgaaacttacttagacttctgttttatcaagcaagttaccggttatcttgctgatgaagtggatcagatgctgaagcaggttttcaaggaacagtatcttaactggtatctagataagaaagtcgaaaatggagtggagattgttgtggctgaagtaaaagggatgagtgagtggatgtctgaagatgacgtcattcagcatctagaaagctgcgctgattcgaaattctgggaagcgttacaaggctatcaatttttcgtctatcctgccaatagggggtgcatctcctgtggctcacgttagcatgcaagatttagaaccatatatcgatcaacccgttcgcatttgtattcatggtgagcgtggagaagagatggcgccctgggtgaataaacgtgtaagaaagctagaatggtgtcctgatcgcacccatctccgcatctttttcgatgatcattacttctttgctgttccacttagtagcgatgttcgtctaacgagaagtgagtggtgtgcttatgataaacaggttggcctctattacgtgatgagaaacgaggagaatgaatatgtataaaaaactacagcttccattgcagacaatgaatctggtaacaggttttatggtctgggtattgatctcatctttattaccgtttatcacagaagatatcgccatcgcacctgagcaaattgcctgggtaacagcggtacctgtcattttgggttcattattgcgcataccgattggttaccttgcgaatcaatttggtgcaagactattatttatgattagcttcattttattgcttttccccgtttactttttaagtgcagctgattccttcgctgatcttctagtgggtggcttattcctcgggattggtggagccattttttctgttggggtaacctctttacctaaatattatgcaaaagaacgccatggatttgttaacggcatatacggagcggggaacattggtacagctattacggctttcgctgccccggttgttgctgcgaattacggctggtcattcacagtgaaattatatatggtgttattaggcatctttattatcgctaactttttcttaggagataaacacgaaccaagggtccaggtacctttagtacaacaaattaaagggatttataagaatgagaagctatggttattctgtttattctattttataacgtttggatcatttgtagcttttacggtgtatttacccaatttcttagttgctaatttcggcctcgaaaaagtagacgctgggataaggacggcagggtttattgtggtagcaacattcttacgtcccgttggaggctttcttgctgacaggttccattccctcattctactcatgtatgtatttggtgggttcacagttgcggcacttattctttcattcgctccttccattcagttgtacacggttgggtgtattacgattgcgatggcagctggaattggaaacggtgtggtgttcaagcttgtcccaatgtatttccagaagcaagcaggaattgccaacggcatcatcgcagcaatgggggggcttggaggctttttcccacctcttattcttgcatcgctttatcagttaacaggacactatgcgattggtttcatggcgttatctcagttagcgcttgtcagtcttgttctcgtcatttggatgtattaccaggataaactgatcctgtctcatcaagtgatggttacgacgccgctcgggatgatggtcacggacaaacaggggaagatcattgcggtcaatcctgctttcacagaacttacaggattcagtgcgaaagaatcaattggggaaaatccgaatatgttgaagtcgggaaaacagtccgctgctttttatgaccagatgtgggaaacactcaaacagaagggattctggcagggacaaatatggaacaaacgaaaagacgggaattatttcttagaatggctgacgattaatgcgattaaagatgattcaggggaagttattcagtatgctggcgtttttagcgatattaccgaagacaagttgaaaatgacgaatgagtaaaggaggttcgagatggcgctaaaagatggtaacgaggctagtacttatattattcagtcacaagaagaagaaataaagcgtattgcactcgagcttcatgaaggtatcagccagaacctgtatagtctctatacaggtttggggtttcttgagacaggcatagaagatccacatatgagaagctatgcgaaagaaatggccacgctaatggagcgtacaattcaagaagtaagactactatctgtcgagctctatccgaatacactcacaacactagggctcatttcagcgcttaaaagttattcgaagctttatacgtcaacgtttggtattctagttaactttgaatcaaccggggatgagaaagtaatgtctgagcggaaaagcatggcggtcttccgtgtttgtcaggaagcactgatcaatatcgccaagtatgcggacgcaacaaatgttacgatacggtttacgtgggaagaaaaatcggtgaaaatacaaatagaagattatgggaaaggtttcgatgtcatcgaagtcatgaagcgaaatcattttactggaatagctgcgatgaaagaaagaatggttcttgcaggcgggaagtgccacgttacttcggaactggcaaacggaacgacggtttctatcagtctacccattcagagagagggggaattctagtgataaaagttcttttagtagatgatcatgcagttgtaaggatgggcttaaaaatgctattgaattcacaaaaagatatggaagttgtaggagaagcgtctgaaggcaatgaaggtattgaaatagcaatggaaacgaatccggatgtaattttgatggatttaagtatgcctcatgggaaggacggtttatcagcgacatctgagctgaaaaagcaattacctcctactgccatcctaattcttacgatgcatgatgatgaagagtatttattccgggccatccaggctggagcgtctggttgcgttttgaagagtgcgcctcatgacgaacttgtacaagcaatccgatcagtctgcagtggcaacgcataccttcatccctcagcaacaaagagattgatggaggaatacatcggtaatttgaagcaggatgaaatggatacctatcaattgttgtccgatcgtgagaaagaagtgcttacgcttgttgcgaaaggatattcgaataaagaaatcgcagaaaagcttgtcatcagtgtgaaaacggttgaaacgcataaaggcaatgtcatggggaagctcaagatcaaaacaagaccagagctggtatccttcgcattaaagaaaggtttgcttgggtatggcattcaataaggaggaaggttgatggaaccgtttgagaagtggatctcacctcaaggtaatcgcttaaagcgagatctttcttgtgatgtcgttggcttggcgctacaaaaccgggctggcctagacattagctggccatgcgtcattggacatcggaatgaaaaatacaaatacatcaccgttcgctacggaaaaggaattgcagggaaagtaatttccagcagtcgtccgatggaaataacctcttttccaaatggtatcctgggcaaatcaaccgattatccgatcatgctagctgaacaactcatttcagcttatgctgtgccattattatgtgatgactctccgaaaggtgcattgttaattggttatcgtaacgtgcatttttttactgaagaagaaaaaagtcaagtgatggaagtagcacgaggggtggagtcgagcttaccggatcattttgttacatttaggagggatcgcttttgattgaaagaaataagagtcacccttctgttgaaacaacggaagaggcaacaattgttacggacaaaaaaggcaacatttattctcttaatgaagaagcgataaatctgtttggacttgttcaaaatggtaatgtaaaaaccattcaacagcttttacctaatctaaatttttcactgctggaacaaggaatagtggtccagcgttttggtgtggggcaaaatggacagtattttccggtgtttttgcggaaaagtgcgtttacgcttaaaggagaatcttacatccttctcgtgatccataagaagaatgatcgatcaattgctggtttagagccccaaaaagtgctgaatgaactcctcgatattaaatttgcacttgatgaatccacgattgttgcgattaccgatcattcaggcaaaattgtgtatgtgaatgatcaattctgtcagatttcaaagtattctcaggaggagctgatcggaagagatcattcaattataaattctggctatcattcaaagaaattcttccgaggtctttggcgaacgattgctaaaggtgaagtgtggaagggcgaaattaagaataaagcaaaggatgggaccccttattgggttgatacaaccattgttccctttttaaataaagaaggaaaaccctatcagtacttagcgattcgttctgaaattacaaaccgaaaaaaagttgaagaagaattaaagcaaatggcaacgagaattattgatgttcaagaggaagaacgaaagagactctctcgtaatttacatgacggaattggccagaatctatacagtcaccttattacgatcagccgaatacacgcagaactgaaccaccctcttattactcaaatgcgtgatgaggcgacagctattattgaggaggttcgagagatttcctgggaattacgaccatctgtattagatgatcttggcctgataccggcgatccgttcattcttaaacagatactcggacaactacaacattgatgttttctttgaatgtgtccttgagaatcgccttggaaaccagtctgaaattacaatctaccgcatcatccaagaagcgttaacaaacgttcgtaaatatgctggtgtcaagcaggcttctgtcacgattcgtgagttaaacgaagtggttcgagtgatggtagaagacaaagggaagggatttgtacaagatcgccatgcttgcggtgttgggttgttcagtatggaagaaagatcaaagtcagtaggtggcgagttgcatatacatacggctcccggaaaaggaacaaaagtgattttagacattccacattagaaggtaagtttcccgagtaaaactataatgcataatgctgcaggatgggaggttttacattggaaaacatgaaaaacattttgaaaagaacttcactttttcttgggttagatgatgaagaaatctaagaaattgaaaaaatcacaagaagaaaacgtttcggtcaacgaagttttgtgtttatggaaggcgatgaacgggaggccgtgtttttcattgaatcaggagtcgttaaaacacataaaattgatgaagacggaaatgaacaggtgttttctttactgcaatcaggggatatgttcccacatgtcggtttcttcgatcaatccccgtacccggcaaatgccagggtgttgcaagacgcggaactcctcatgattcgaattgaggattttaatcaactcatgattgaaaaacctcacctggcgattaaagtgatgatgatgatggggaaaaagattatccagttacaggaacgagtccaatcactcatatcacaagatgttcggcatcgtttcatacaagccattaccagattagcttatgaaaatgggaagaagcgtgatgggggagtcgccattgattttccgattacgaaccaggatctagcgaatatagtaggcacgtctcgtgaatcgatcaatcggttattaaatgaattaaaaagggatcagatattaaaaagcgatcgtaatggcatatttatttatgaccttgccaaactgcagcattcggaatgacaaaaaggcacatcttgtgcctttttgcgttaaaaatgaagtttctattaatgatgaatattcgctcgttcgaggcgcggaaaaaggatattattctcgagatggatatgctgaaatagatcggattcgagttcttctaatttaaggtacatcaaggtataagttgtgcaggcaccttctggaagtgtgtaatcgtccgtaacagctcgaagttcttttaataaattaccagcttcctcgtgctcttgctccagggtgtcaattgtttcgagtactttattcaaggtatcctgtgattggtcttcttcgtacgccttaattttaggaaagactttatcttcctcttgaattaagtgatcttctagttcaagtttaagtctacgaaacaagctatagacctgacttaattctgggtgtttcattccgtgcacacggtagacttttgtgacaaaggcgttgagttcagaaaggacgttatcaaggtacgcatggtgtgtattgagaatatgatcgatcaaacttgagtaccgttccaactcccagttcacttctcgttcattcaattccttcgcttctacatagagtgtattcaatctggagaggacttcttcttcattaaggtttttctcagcaatggcttcacgaataggacggttacctccacaacaaaaatcaaggcgatattccttcagaatctggcttgctcttggaaattgtgtgacgatctcaccagttttcgtagccccattaaacatcttttccatcgttataacctcccgaattgttacctattcttaagtacactcttaatgtaaaccatttctatgcgctaaactgtgggataaatcacataagataaggtaaacccatcacttaaaaatatggagtgataaggattgaatactaacagcgttaatagccattttaaaagctaccctaaaagagtagctttttaaaatttagttatgtacttgaagtttgtttccactagggtcaaaaaagtgaaagaattggtgtccctcatcttcttgaatcggttctactttcacatcttgttcaactaaatagtcatagagtcgatgtatatctgctgttgtcagaccaacaaaaaattctggctcaccatttttgaaaaagtgtcctctggagctctcgtctgcttctactaaaacgaagaggggaccttcttcaagcgataaaacagctaaatcacctcgattaaattttaagttaaactgtaaacactctgagtaccaggaaacggactcactgagatcaacgactggtattcggatgtagtgaataccactaaaaagagaatgactcattttattcctccttacgtaatcgttacctaaatccatttcggtaagttcgcatcgtctccttcttatttttatgattaatgattattgatagatttattgattgaattttgaaataattggtatgatgaaaagtcgttatctctaatagaaagtgcaggcgggtactcatggaaaaagagatgaaaagtaaagtggaagaaataataggaaaaatagagcgaatgagtttattacaagatcaggggtgtacctcagaagtgcatcaagtcgtcacagaggaaggcagctatgtgctaaaaagttcctatgaacgaaaatatcgagaatggttaagaaatgaagctgttgtattagaaaagctaaatacgaacactgagatccccacgccgagctactatggttattttgaagggaagaatagtagccatctcattatgtcatttgagaaggggataacattaacaactgcattgagagaagcagagaagcaagaacaactgtcactaattaagagttttggacagtttcttcaacgtctccatgaaacgactgttactgggtttcataataatcattggcttgctgaacagttaaaaaaggcggagagttacctgaaaactggtcatgctgacggggatttagagcttttacagaagataacattagatcgaccttcaagcgtccaacaaacgatgatacacggggactgcacgaccgataatgtcatggttttagacggaaaattgattatgtttattgatgttgggggaatgacgataggcgatcctaggtatgatgaatccttagcgattcgaaaatggattaaccataaggaatacatggaagctttttatgaaggatacaggcgttataaggtaacaaaagaagagttcgagtattttaatgaggggttatatgaatttttctaacctagctaacaattaatttatggatcaactaaaaaggaacaatagctgcttactaatcgtcattataatagatagtcaatactgagggaaaaatttcgatttgatgaataaaaggagagagcgtatgggagtttggtatttcttactcttgtttattggattgtttttagtaggaaaaggactcattggaagtaaacgaatttctttcgtttgtataggcgcactatttatcttgttcgctctttttatgttctcaccagggagtgatgagatcattgctgatttattgaatttgaactgaaaggaaaattgagatagaaaaccaagggacgttcctatccaaacgaggtgttaggttgaagacaaaagaagatatcatgaagctaatcgaaagcgatgaacgaatgatggaaatcatcaaggctgcaagtcaactgagtttgccagattggtggatatgcgcgggatttgtccgttcaaagatttgggacacactacacggattcgaaaacagaactgacccgccagatgttgatgtcatttattatgatcatgaagatataagtgaaaaaaccgaaaaagaattagaggctgagttgatgagaattctcccggatgtaccttggtctgttaagaatgaagcacgaatgcacgtgatgaatcacatcgaaccctatacttctgcagaggatgcgatttccaagtttccagaaaccgccactgctcttggtgtcaaaatcgataaggataacaatcttattcttactgctccctggggtgtcgatgatgtaatcaatttagagttgaagccaacacccttttttaaagagagtaaagaacgagttgccatttatagagagcgagtgataaagaaaaattggaaggggatttgggagaagatcaacgtgtataagttatagaatgatgcttttagaaggagattatctgcgatgaggtagtctcttttttataattgaaatagaatggccgtgtctagttaaaggctaaattcttaaagaaacacaatgaatttctagttagttaccaatttttgaaacttaagacagttgctgatcgtacatataacaagagccaataaaacggaggttgttttttgcttaaaaaaatcttattcattacgatggtgctcatcataactgctggttgtgcatctaaccagtcttctagcgaaaacatggaagaagagaatacgacgaaagatgatgtcacaacggtgcttgagcaaatattttcaggaccggatgaagaattaacacagatttatgaagaggaaaagtacgaagaggtttctacctactacatggacaaattcaactcttactttacagaagactatatggagagtgcgatgaacaccaatttacttaacagctttcatcttaaggcgtatggaaatggtcttaaaatggctattgggaccataaacgttgagcagcgtgaggacacagcaaccgcctatgattttgacatacaagtcaatgtaagcaatggtcaaacggcggatgttagtgggagagtcaacacaaacgaagaaggaaagattacgcaaatccgctatatggatcctcaatcattgccctatgctttcgatacagcaacagaaacagaagatggactattcgactatgatcgttcaagattagtaagtcgaactggagatgaagcctatcagcctatgtatccgacagtcatgccttttgaagtagatggggtagaaatcaaacatgagagtcaggatgacagctccataacgtttatctttcatggtgaatcaggtgaaaagatggaattgacgaccgtacaaaatggtgagatctcttctgatcaggtagagacagaggagatttcaattggcgatcaaaaaggattgtatgcaggaaaggaaggcgaaacgcaacgattgatttggacaaatggttcgatcacttatgagttgaaagggaggatagaagacttatcaaaagaagatctgcttatagttgcggagtcttttgaataaggggggaatgagagggctgatcattaggaagatgagctctcttttttagtaatctcgtagtgaatgtttttaaaaaatagggtaggtatatttatgctaaagttttcggtttctccctttacgtatatttggagccactatgaaaaatccacatataaagcctccaatggaagagccagttaaaacactccatgtaggaaggtcaccacctaatagtaaagccatcaaaatccatacaatcggatagattaatatacctacgaatccccatagaaaccgttttttcatatccaacacccctattttttcttcttacatactagtagccttcttgataacggattaaacgaaaaatagagttaatctctcctatacaggaatgcttttttaaaagaaaggtggaattatattgatatacaaagaggactgtccattttgtcatcctgaaagagacgacaaacaaaagattctatttgaaaatgaatgttgctacttcttacaacatgacgatcaacaagatatcttagaaggttgtggagtcatcgttcctaagaagcatcacgctaatgcatttgaattatcgaaagaagagtggaacgacacctatgaacttctacaggatgcaaagaaatacctggatcaagcgttttctccagatggttatacactcggttggaatgtcggagaagtctcaaatcaattcattttccatagtcatctgcatgttataccaagatatgatgacgaaccattggctgggaaaggattgcgttactggcttaaacagcctgaaaataaaagaaaaaagttacatctgtagttcttactagaataactttactttttctaaatcaaagagcggtgattaaataatagcggagatcccattcgaacgggatttcctttttttgctttaataccattttataaaaatgaaacttttttccttctttatcactctaatggcaaaaggaggttaatcatgaatgaagtaaagcttgtcaagaaagcgaaaaagggagacaaggaagcttttgaacaactccttgtcttacataaagatcagttatatcgaacggcatttctttatgtgcgaaatcgagaggatgcattggatgttgttcaagaaacggcgtttcgaagttatttagccatcaagacgttacaagaagaaaagttctttgttacgtggctaacgaagatcctcattcgctgcgcttacgattccttaaagaaaagaaaaaataacgttccattagaaaaggtaacgccaattttatcaaagcttgataaacgttcagacgacgtaatggatttggctgatgctacaaataagcttgaacagaaataccgagatgtgattgtgctgttccattatcatgatttgtcgataaaggaagtggctcttgtcctggatctacctgaaaatacggtgaagacatatctccaaagaggtcgaaagcagttgagaacaattttagagggggctggtttaaatgaaggaaaatctttataaggatcagtatgacaaaatcgatgtacctgaggatgaattattacgttctattcaatctggtattgatcaagcggacgggaaacagtcatttaaacatcaacgaaaaataaagcgatccattgtttcaacggcagcagcggttgtactgtcagcaacattcctttcatccaacgtatcaaatgctcttgcagacgtcccggttattggcgaagcttatcatgtttttaatgatatggttggtcggaacttaacatcccaacagttaattacagaacttgatgagaaatcgagtggtaaagggctagatgtgatggtgacgagtgcttattacgatggagcagtgatcggtgtatcgtttaaagttgaaggaaacgtgaaagaagatgagcttcataaagtgaacggtttctatgaaatttacggaggtaatgaggccattagtgatagtaaagaaatcgttgctttggagaaaagtggcgatggctatattggacaaattcagttagcttatccaggcaaagaactaccggccaacacctccttcccactagaatttaaacgaattggagaaaaagaaggctcatggaaattcgatgttccggttgagcaacttccatatgaagaagtgaaattagatgaagtaagatccaatgagcaagcagatgttgctgttcaatttaactcgatcatagaaggtcaggcgtcaacggctatcaattatactggtacattcccgcttgaagggaagcatgatcaagttcgtcttgatgtagtggatgaaaacggcgaacctgtaaacgtatcagtggatgggatcgatctagaaacgagtcaagaaaatgatcaaatcgttgtcaaaggaagaagtattatccctgagaatctaaaggagagaacggattatatagagattcatccaaaagtagcggtcagtggagtagaagatcaatttatacgcctttcagataaactccctgtgaaaattcagtcgagtagacaggatcatgttatttcagtaaacaatataaaagttgatggggagaacgttacactggactttcaaataaacaatggaagagccgatcggtattttggattctataaagacatggctcgaactgaagttgtgctagttaaggaaagcagaaaagagatttatgaagaaccacttaaacacacggtgaaagtgctcgataaagataagctttcttttagaagtacgtttgatgttagcaacttgaaagatttcaatgaagataactacgtggtaagagtgagtttaggaacattaagtagtaatttgcctgtcgaattggaaccggtcaaaattgaattgaattaaattgccaagtaaggattgcttgagatcttgagccggagtggaggatgttccacaaaatggtggcgtctgtgggaagcgctgatggagttgattacgtatccagatggtatcgattatccagaggaaagtgaagcagagaggtggactccgtcgaaaagaggagaagggtaaggtgaaatcctgttgctgtgctaaataggttttggttacatgaaaaagaagtactagtgatgtttccactagcacttctttttatcttatatggatttcgtagcacgattcttcagtatctttccatcactcatcgtgacgatatgatccgcataagctaacatttcttcatcatgggtaaccgttagtgtcgtcatcccaagcgatttcgttacgtgctgaattaacgccatggtgtcttttgactttttggaatcaagacttgcagttggctcatcggcaaacagcactgttgggttgtggataatggcgcgtgcgacggcaactcgctgtttttctccgcctgataaggaggaagggtaggctgtaagacgatgcgtcattcccaccttttctaatacgtccgttatctgttttcgcttgtcgtgtttgtttattttcatttcagccacgtccatcatcattgaaagttgttcttcaactgtgagaaaaggaacgaggtgggatgactgaaaaacaaaaccgaaatgatgcgctcgaatgtttcgcacctgttctgatcgcatttcagctaaattctgattttcaaaaaggacgcgaccgcttgagagaggttgaagaccggcagcgattgtcagcaacgtgctttttcctgaacctgaagcaccgattagcgctgtgacttcacctttctgaagcgataaatccaccccttttaacacttcttcttcgatttctccatttatgaacgactttcttacttgttctaattgtagatgcgtcatgttaagcctctccttgttgaatagcctgcaaaggttcaattttcctaatttgaaagcctgatagcgtcgatcctaagaaaccaacaatcacgaagacgaaggatagttgtattgttgttgtaagagttaagtgataaggcattgtatcaggagcaattacttgaaaaacttggctcaatagtccagaaacgaaaagagctattatcgtaataagcgccatttgactccagatcattttaaacaaatcccctgtgcgaattccgagtgctttaagaatgccgtacatcccgattttttggacattcatcatataaaagaaaatcgcaaacagcatgccgctaattacaacgagaaaccaaacaatcatatttagcgtcatttgttcagcctggtaacttggaatggtagagagaaattcgttcttagaaaaggactgcaacccgctgatctcctcggttgtattgggacgatagatgagctgtaattcatccgttcgaaacatgtttttaaatgattcctgattgataaacgcaacgggtgagtgattaaactttttgttatcaacaaaatcaatcaccttaaatgttccgtcaaagagaggggtggttagttcatcaccaaccttgatgccttccgcttttaacgagcgatcgagaatcacttctcctttgtttacctgtttaaacaatggcgtatctgtagaagtgagaaaggcaacgctttgctgattgtctgcttcatttttgagtgatcccatttgaagggaaaaggcaaatgcgtcctgatcgctctcaaggatttgttgctctttattctcttcaagatgagattgcgtgtaggattcatttgagtcttcactcatgtaaaacgtgccctccggcatgtttttgatcaatgagacattgtcttgagataagccatttgcaagaccagaaataatgaacgtgaccagactaatgagtagcacgatggagccaacggtaacaaatttcggtttatttttcttcatttctttccaagccatattcatttaccatcattcctttctataagaaaaacctttcgttcctgacactgattactttaaatcagttaagtgaacaaaaggttaatgaacgattacaaatgtggaagagtgattctaaatgtggtgccttttcctaacttactttcgacgagaatatcaccttgatggagttcaataatttcttttacaatggataagcccaagcctgtgccttgctgtgttctcgtacgagctaggtcggcacgataaaagcgatcaaagatttgttctttttcattcggctccaagccgatgcctgtatccgtaaaggttagttggatttggtcttgagagtcttttaacataagctcaatcgatccacctggctcgttgtattttattgcgttcgttaaaaggttttcccaggcggtatataacagctccggattccctttaaatctaacttcgtcaagagtataggttaaagaaagctccttttcatcgattcgccaataatagcgatgcaaaaggctttttaattgagcggataaatcaaccgattttctggggtgatctttctcttttggttcaagagaggatagcgttaatagctgtttggataaaatggacatccgttctgcttcctcttgaatgacacgcaagtatgcttttctgtcttcctcggaaagagcattgttttctaataaacgactgtacccctgtatatttaataaaggggtttgaatatcatgagatacatttgagacaaatgacttccgaagcttatctaatttaccgagccttgcgatcatttctttaaaattctgcgccagctggccaatctcatctcttcgatgaatgtctaagtgaacatcaaaaccttcttcacgtactttattcgttgcgtgagatagctttcggattgggcgaatcaacatcgcggaccaaatgagttctgctagtaaacttaagataaagatcactaacaccatccatcctaaaaggagatggatctcgttaaataagagcttaatatctggtcgcaaaaatagcgcatactgcttaccatcgtatgtcaacggcacaccgactgaatttttaagctcgttggcgaagaaccctgtcacaaatgttttcttcggaaattccttcatgccatgatagggttggccatctaagacgtcttcgatcgcttcttgcgataagtttttttctttaaattcccctccataaaaacggctttctccctgaccaactaaaagaagctggtaacctgttgccgctgtatggctaaggtactcttctaggtccgcctgtgtttcggcgaactccgctatgcttgttgcgatctccatgtttttcgcgtcgttttcaggttttaagttgttttggtagtaagcattcgcaaagaaaaagccaataacggaactgatgagcataatgattagcgttgttaggataaatttcgagtagagggatttcatcatgatgtgacctctagcttataaccaattccgcgaacggttacaattttgatgcttgaggtgaccgctcctagccgttcacgaaccctcttaatgtgaacatttaacgttctctcatccccttcgaaatcaagcccccatatgttttcaatcagataatctcgattaaaaacttggttcgggcgagaagccaatagggctagtaactcaaactcctttaaaggcataagaaggtgctgttttccaatttgtacctcataatttcttttatcaatttttacatcagccagctgtatcgtatactgactcggcttatcatatcgtcttaaaacagcctggacacgaaaaatcagttccttcggttcaaatggtttgacgatataatcgtccgttcctgcggtgtatccttgttctttatcatgcagctcgcctttggcggttaataagataacgggaatatcgtacgtatctcggatttttttggtaagtgtatatccgtctaatcctggcatcatcacatccacgattgcgaagtcaatcgtaacttcttctaatcgagctaaagcttctatgccatttcttgatgtgaatgtatgaaatccagcatctcggagcgtaacttcgacaaggtttaaaatgtgcggatcgtcatcgatgattaagatggaaatcacgtttttcaccctttctttacagaatctctcccacctatcttacaacgtaaaggtgaacagaagattaacgggtaagagatcgtgctgaattttatttatcagatttggcccgttcgtttcatataccgtctcattcattctttctcaacaatgttttgctcaagcgttttttatcgattttttatgaaatgaaaattaaaaatgtccaaatgacaaatatatattgcaaaaagacgttgatattatataatggaaaaagaaggatatggttcatttgaatgagggggatgagaatgagtattgagatgcgtacactatcaaaaacgttcaataagaaggaacgagcactttctgacattcaatttacgctacgaaaaggggaagttgttgggctcgttggaccaaacggggcggggaagacgactttaatgaaaattatttctggaattatcgtgcagtatgacggggagcttacattcagggagcaaggtcggtcaattgggagtttaattgagaagccgaagttctttccaaataaaagcggacggtacaatatccattattttcgttccttgtttggtggagacgatgaacatttcgatgaaatcattcagtctcttggtatggaatcgtacttaaagaaaaaggtgaaggactattcgcttgggatgaagcagcgtcttgggattgcgctcgcgcttatttcaaatccggattatctcgtattggatgaaccgacaaatggcatggacccggagggaatacgaaatattcttggctatttaaagaggctcgcaaaggaaaaaggcattggcatactgatttcaagtcacattttagaagatgtcgagaatataagtgatcgtgtttatgtgattaaagagggacggttgattaatgagtatgcaagggaacaaaatcgtgcggaagttttagagctaatgttttctgaaagagatcttcctcaagccgtgaatgtgttagccggatacgaaggagtgatccgcagtggaagtgttctttcagttccatttgatggagatatgaaacaggtactgaagcacttaggtcaacacgatcttttcccagccgatgtgaagcggaaaaaggacacgcttgaggatttctattttcaaaatatggagagtgaagcgaagtgaattttggacaatacatgaagcttgagataaaacgtaaccttaacctgccgctgtttctgtcgattgcatttgcctttttgtttggtggaggaattgtttattcgatttacgaactggatggcccgtttcagcctcggaatgtatcagggttatatgcgggcatcgcaacggtggcgcttggcgtattatgtgcgaaagtcgtgattgctgatctgcattacggtacgatctatcttctttttacatccgctcgcgatcggatcacgtttttggtgtcccgggtgattgtgattagcacgatgtcactgttgttcggactaggctgttcgacactgctttttgtgaatcatcaattaaatggtcaagctttttcagcatcggatgttgggacgtcggtgcttcactatgtgttatttggcgttttctttaccttactttttcaagtgatctcaatgtattatcagaaggtgatgcagctgttaatcctttcgcttgtgacgattttggtgctgccagggttacttggcattgtgtttcaggtggaggccattcctgattttgtgaaagatcttgtagcgtatgcaccggtttatagtttgccgaatcagctgccgtttcttgcgctggatggggtggaaatgggtgttactgcggttgtgagtttgctattgtttgtgtttgcgtatgagcggttaccgaagattgattactagaataggctaggaggagtacggatgggatttggagtaaagaaaaaacagaaggatgaacggctgacgaatttgcaaaataagatttaccgggaaatgtacattcttatcgtggtgatttgtgggttgtctgttttgtataaacagtttctcgttgaagggggaacgcaacatttatggacagagatcatcatttttagtgtcagttcgttgtattatcttattcgatcaacgatgcttggaatcttttcagatgaggtagagatgcacgatcgatcgagtaagataagctttagtaaacgtaatttcttgatcagtcttttcttgggagtgggtttttccctgttccttgcgatcaggaattctctgaagtatgctgacagtacacaggaagctttgtcattcttctttgtcattctttttgcatgcttaatgatttacattcctgtcttatttggcataatggtgttaccctatgcggtagcgaagtataaaagtgataagataaatgagcgggaattagaagagatggatgatgaagatgtgcggtgatgaatggtgaagaatgtcagattaaaaatggcgagagtcgagcacgatctctcccagcaggagctggccaaaaaagtaggcgtgtcgagacagacgattgggctgattgagctagggaaatacaacccatcgctacagctatgtttatcgatctgttgggcgttaaataaatcgcttgatgagttgttttggatggatccggaatagagaaaagctacgtcattctacgagttgtggagtgaggtagcttttttagttatttaggttgttttccgaagttaagcgcgatcgaaatgatgcctacaaggaaacatggaaaactaatgagtaaggcttcaatccatgaatttccgattgttcggtacaataagatggctaaggtcgcgacgataaagtatgtaggtatgaattttcttgataacagtaatttattcataagatgcagctccaacgctacgagagtcgtttcaaagtttcaatgattggtttcgacatattgtaacatgaatcgggtggtgacaggcacttacctgacctgtaagtctttctcacatcattcttttctgatcgtccaagccttttcagtcacttgttgaatttcttgtgagaattcctaacgctaaattaatttttaattttcagacatgataggataatttcatactttaatgtgttaggaagaggggataccgtgaaggagaaaatcttggtcgttggaaatggtatggcaggcatacgttttcttgaaagttttctaaaaattgaaccggagcggtttgagattacggttattggaaaagagcgatatccagcttataacagaatgatgctctctagtattcttcagggagagacaccacttgaagatgtggttatatacgatatggaatggtatgtgtctcagggcatatgtttttttgcaaatgaaactgttgtgtcgattctccctgcttcgaaccaagtgaaaacggaccgaggcagaaagattccttacgatcaccttgtcattgcatccggttctagcccctatgttctcccggtgaaaggtgctgatctgaatggtgtgatggcctttcgaacgttgcaggattatgaagaattgttgagcagagctggtcgatctcggaaggcgacggtgattggggctggactacttggtcttgaagcggcggttggtctagtgaatcacgggtttgaaactacggtagtgcatcatcagccgaacgtaatgaatcgccagctcgatacgtatgctgctggtttattacaagaagaactcgaggcgcagggcatacgatttttactgaacaagcgaacgaaagaattgcgggggaatcggagggtagaagcgattcgttttgcagatggacattcaatggagacggatcttgtccttatgtcagttggcattcgtccgaatgttgattttgccagaagatctggacttgagattaggaaagggattgtggtgaatgacgccatgcagacgaaccttcccaacgtttatgcgatcggtgagtgcgcagagcaccgtggagtgacttatggacttgttgggccaatctatgagcaggcaagtcagttagcgcggacgctttctggaattcgcggggaacgatacaagggctcaacggtttctacttttctcaaaatccgtaacatcgaggcattctcagctggacaggtgcttgaaacggaagagacgagaacatttaaatggattgatcccgttcgaaacatctacaaaaaaattgtaacgatgaatgattcaattatcggtgccattctttatggagatacaacggatgccaatcaaatttccaaaatggtactcgatcaagcatcggtgaaaggaattccggaatacagcatgatgccaggtgaatcgagtggtgagactaccatgcttgaagtgccagatagcacaacaatttgccagtgtaacggagtgacaaaaggagcgattacagccgcggttcataaagaaggattaacgacagttgatgaaattaaacttcatacaaaagcctctagttcttgcggtggttgccgcggtgtggtgtgtgacttgcttgatgcttgtttaaatacggaagttcaggttacgccatcgatgtgtccgtgtacgtcccatactgaacaggaaattgtggaagcaattcgcggtgagaacctacatgatgtaaaagaagttcatcagttgttcggatggaaagacgatggcggatgcgacacctgtcgaccagctttatcgtactatttaaacggacgttcggatgagccgtctgtatcgtcttcattattggatgatggaacatatgcaattgttcacaaaatgggctcaggatttgcgactggagaagatttaaggagcatcacttcaatcacagagcgttttaacgtgccgatacttcgctttacggaacagcggataaagatgattggtgtgcaaaaagaagcgcttccttacgtacttgaacaacttggggcggctgggtcttcaggggatctttctatccgaattcatgaaggggttgaaattggttataaaaaagtgatgcagtttattcaactagggaaggaattcgagcggcgtcttggaagattgaatttgcctgaaaaagtagacataacggtatcagcttcttttctaattgatttcgatacagatcttatagttgtatatgagggaaatcattttgaagcgcatttgacggacaacggggaatcacatcttttattccgtgtcgaagaagaggttgagctgatcgatcaaataggggcattccttcaactttataaacttgatgcattttatcatgaacgggtgcaagactgggtcagtcgagctggattaattcaggttagggaagccatttttgatgaggagatgtttgcaggtttgcaggcttatctggatcaatatattgaaaatcaagtaaaacaatcatatcgtacagtgatgaggagtgtggagagatgaaggattttttgcatcatttcagacagacagaacgggaacgaggctcagaagaggtttatgaatcacagtgtccattttgtagtgtgcaatgtacaatgaagcttgtagaagagcgaatcgtgacacgtaaaaaaatttctgtaagcggcacgtcaaatgagacgtctgaaggtcgcctttgtgtaaagggaatgcatgcgcatcaacatcacttcaatccgaaacgtattcaaacaccacttcttagaaaagggaatgcctttgtctccattacatgggacgaggcattttcttatttaagtgagcgctttcaatccatccggaagagagatggaaacgatgcgattggggtgtatggtggtggatcgctcacaaatgaagaagcgtatttgcttgggaaatttgccagagtgacacttgggacacgttttatcgactataatggacgattttgtatgtcagcggcagcttcaggagccaatgatgcttttggaattgaccgcgggtttacgaataagctgagtgaaatcccttattccaaatgcatcattctcgctgggaccaatttggctgaatgtcagccaactttaatgccatatttggaagaggcgaagcaaaatggcgcttatattatcgcgattgatcctcgagaaacaggaacgacagatctagcaaatgaacatgtaaaaattaagccagggatggatgcatcttttgtaaatgggcttattaaagtgatgttaaatgagaatctggttgatccagagtttatcactgaacgaacgaatgggtatgaagagctttgtggtcatataaaggaagttgatgttgcgcatatttctgaacttgtagatgtccctgtggaaacaataataggggttgctcgtgctttcgcgtcatcaccgacaggaatgattcttacggctaggggagttgagcagcaggcttatggctatgatacggtcagaaattacatcaatttgcttcttttaaccgggaaaatcggtcgaattggctgtggatatggtgctgtgaccggtcaggggaatggacagggaggacgtgagcatgggcaaaaggctgatcagcttccgggctatcgttccattgaaaaccttgaggaccgacgctatatttccgacgtgtgggggatagaggaaaaagacctgcctcgaaaaggtgtatctgcctacgaaatgatggagaagattgatgacggtgagataaaagggctatttgtaatggggtcgaaccctgttgtgtcgaatccaaacagtcatcttgttgaacgtgcgctcggctctctcgagtgtcttgttgtcgtcgatctgtatgaatctgaaactgctaaactagctgatttgattctaccatcttcttcctatcttgaagatgagggaacgatgacgaactttgaaggtagggttgtgcttcggaatggggcacgtaatcgtcctgccaatgtaaagcatgactgggaaatcctatgtgagctgtcctctgtccttggaaaaggaagccacttcccctacaccaaccctatagagatctttaatgaattacgtatagcgagcaaagggggcattgcagactattctggtatcacctatagccgacttcaaacggagcgtgtgtattggccatgcacggaaaagaatcctcttggtgtaaaacgattgtttagcgagtcgtttccaacaaaagatggtcgtgcttcaattggcgcgatccctaatcacgttcctagcgaacaaataaatgaacactatccgttgtatttaacgaccggaagagtacttgagcactatttgacaggcgtacaaacacgtcattctccaggtcttcgttcaagagtacttgagccttttgttcaaattcatccggatacagcaaagcgttttgggctgcaagctcatgaaatggcacgattaacctcaccacgaggtaacatccaattaaggtgtcatctatccgaaaaaatacgccctgacaccctttttgtaccgtttcattggggaggggagcagtgtattaaccggctaacctctcatgaactggatccgaggtgcaaaatgccttcatttaaagtttgctctgtagatattcgccctgctaaagcgaatattgatgtaaaataatctaacatacaagagaaaaaaggatttaaagaggtagcagagctttcgtgctgcctttttcgtcgttttgcgccctttttaatgtaatcgcttccgaaaataggatgttagataagatgacgaattgcaacattctattatcagaatattttaaacttcaaaacatatccaggatatgcatcttttgaaaatgaggaggaaatacgcaacgtgaaaaaacgacgaattgcccctaacgtttcgatccttggtctgactacttttgcattctttctgtcctttgttgtttggtttaatatggcaccttttattcacgtgattgagcagacgtttcaactcacgaatgatgaggttggtgcgttactagtgatgaatgttgccttaaccattccagcgcgtgtattgattggcgttctggttgatcgatttggttcacgaaaggtttattcaagtttattaatcctgatgagtattccgtgttttgcttttgcattagcaacgacctattggcaacttctcatcagtcgaatgtttcttgggattatcggtgctggttttgttatcggtatccggatgatctcagaatggtttccagagaaaaggttggggattgcagaaggaatttatggtggttgggggaacttcggttctgctgcagctgccatgtcactgcctgcgttagctcttttcttaggaggggaagaaggctggcgatatgcaattggaataactggattacttgttctcatctatggatttgttttcttcttcaaagcttcagatacacctgaatcgaaatccttaccaggtgcgaagcggaagggaggacttgaagtaacaagctacaaaggcttgattggtctactcgccatgatgcttccgatgtacggaattctaggggtgttcctatggaaactatatacgatggccatcctttcgagtggagcagcaatcagtgggtgtatgattctcctcatcctttttgttgttagtagcttccggacaatacagtataaccgtcgttctctagaacgaggtattcctgatcatgagaagtattcgttcaaacaggtgtttattcttgcggctgcttactttgtaacatttggctctgaactggcggttgtgtcgatgcttcctctgttttttagtgaaacatttgatcttggtcttgctgccgctggtctgattgcgggatcatttgcctttacaaaccttgttgctcgtccacttggtggttacttgagcgatcgatatgggcgaaagttgatacttacgattatgcttttaggactctcggttggttattttctcatgtcacaagtaaccggaacatggccactcgcactcgccattgcggtaacgatgctttgctctttttttgtacagggtggggaaggtgcagtgtttgcaatggtaccgctcgtaaagaagaaaattacagggcaaattgctggactcgtcggcgcctacggcaatgttggggccaccacgtttctaacggtttatagcgttattcaaccgggacaattttttatggtgattagtgtgacgggcatggtctgtacggcgggaatgcttttgcttgctgaaccgagtagacaaggcattcggaaaagaaaaatgtcgaggatgggcgtaccgtcaaattctagcgtatcaagataattatgaacggaggagatcgtatgaaagaacgaatcatcgttataggaaatggtatggcaggcattcgatgtgtggaagagatcgtgaaattgaagccggatgcatacgacatcactgtaatcggtaaagaacggactccggcatatgaccgtattcaattatcaacggttttacaagggaatggcactgttgatgaacttctaatcaaatcgatcgattggtatgacgaacagctggtgacgcttaagacaggggaagccgtgacagagattgataaagagcagaggatcgtctacacaaacaaaggagaaacgttattatatgatcgcttagttattgcaacaggctctaatccttttatcattccgtttccaggtgtagataaaaaaggtgttattacgttcagagatattgatgactgcaacgccatgattgaatcggcaaaaacgaagaagaaagctgtcgttattggaggagggctgcttggattagaagcagcaagggggctgcttaatttaaatatggaagtgagcgttgtccataatacagacgcccttatggatcgtcaactagatgcaacggcttcccaaatgctaaagggtgaactcgaacaacagggaatgaccttcttcatggaaaaagagacaacaaaagtgatggggaatgaccatgtgagtggtcttgctttcaaagatggcgatgagattgacgccgatcttgtggtcatggcagtagggattaagccaaatatcgcccttgcgaaagaaaccgggctagagacaaaccgcggcattatcgtagatgattttatgagaacatcttttgatggaatttatgcggttggcgaatgtgcagaacaccgcggaatcgcttatggacttgttgctccactttacgaacaggccgccgtcctcgcaaaaacgattagcggagatgagacgtcaccttatgagggttccgttgtttttacaaagcttaaagtatcaggtgtagatgttttttcagccgggatttttcaagaagaagaaggtataaaggcgattcgcattcacgatgagtctgaaggcatttataagaaaatcatgatcgctgatgagaaaatagtcggaacggtaatgtttggagatacgtccgatagttcaagaattcttagttacatgcgatcggaaatgaacatagggacaatgaaaaaggtggctcttctagaaccagaaggagaggaaagtggcacgaatctgattgcgtcaatgcctgatggagaaatcgtttgtgggtgtaatggtgtaacaaaaggaacgataacgaatgcgattcaagaacaagggcttcgaacagttggcgaaatcaaaggatgtacgaatgcgtcaaggtcatgtggtgggtgtaaaccgctagtcagtcaaatcctggagcataccctcggtgacggagttaatcttggtgaagaaatggaaccgatttgtggatgtacgcctctttctagaaatgaagttgttgaagcgattcgagaaaaagggcttcaatcaacgaaagaagtgtatcatgtacttgattttgaaaataaagaaggttgttcaaaatgtcgtccttctcttaattactatcttggcatgctgttccctgaagaatatgaggatgaggcagcctcccgttttgtaaatgaacgtatgcacgccaatattcaaaatgatggtactttctcggttgttcctcgcatgtatgggggtgtcacgacttcggatcagcttaggaaaattgcagatgtgagtgataaatacaaaatcaaaatgctgaaagtaacaggcggacaacgaattgatatgctcggtgcgaagaaagacgacctaccatcgatttggtccgatcttgatatgccttcaggatatgcgtacggaaaagcgctacgaactgtgaagacatgtgttggagagcagttttgtcgctttggtacgcaggattctattggtctaggcgttcgccttgaaaagaaatttgaacggcttcagaccccacataaagtaaagatggcagtatctgcctgtcctcgaagttgtgcagagtcaggttttaaagatgtgggtatcattggagtggatggagcatgggaactttatgttggcgggaatggaggcattaatgtccagagtggccacttgcttgcgagtgttacgtccgatgaagaagtgatgcgaacgacaggagcgtacctccaatactaccgcgaaacggcaaattatttagaacgaacgtcagcgtgggtgggacgagttggtattgatcatgtaaaagaggtcctttcggatgagggtgaagtgaataacctgaatgatcgtattgaccttgcgcttcgatcaacaagagacccatggaaagaagcgcttgaagatcgaaccgttcgtcaacaattcgaaacgattttacaaccataaataactatgattgggaggagtgctcagatgacagttcaggcaacgaaggtcaatattggaagaatcgaaaattttccccgacagtcaggaaaaaccgtcgaagttctaaaatggtcaattgctgtttttcacttgtcagatggaacgctacaggccgttgagaacaaatgtcctcacaaaggaggtccacttgcggaaggaattgtatgcggggaccatgtttattgtccgtttcacgattggaaaatcaatatgaaagacggagaggttcagaaaccagataccggatgtgttcagacgttttctatagatgaaaaagatggttacgtatacctgacaattgagtagatgactaaaaaagggagcgatcaaaatggggaaagtgtatttaattggagctggaccaggagacccggacttgattacattaaaaggaatccgtgcgatcgaagcatcagatgtcatcttatacgaccgacttataagtgaagaactattaaactatgcgaaacctggagcggaactcatcttttgtgggaaactaccgaattatcatgcgatgtcacaggaaacgatcaatcgttttctcgttaaatacgcaaagaaaggaaaaatcgtttcaagactcaaaggtggagatcccttcattttcggacgcggaggagaagaagccgaatgggttagtaaaagaggtattcagtttgaaattgttcctggcattacagcaggagctgcagcccctgcgtatgcaggtataccgctaacccaccgctcggtgagtggttccatcacttttataaccgggcatattcagtcaggtgaaaatgaaggagaatgggagcacctcgccaaaggaacaggtaccattgcaatctacatgggtgtgagcaagctaccttctatttgtaagaggttaataacttatggtagatcggatgaaacgccggttggagtgatctatcaaggtacaacagaagagcaactggttctaactggaacgctagctaccatttcagatcaagtgaaaatggctaagatgaagaatccttcaatgattgtcgttggtgaagttgtttcctatcatgaaagtttgaaatggtttgagccaggaagagtggtaacagaagccgttcaagcggaagggacataaagagtggtgcattacagggaggtttctcagaaagcatagttatttatggatggattcggaatagaggaaaagctacgtcattctacgagttgtggagtgaggtagcttttttagtgttagtttgcggcttgaatcattgagttcgacaaattctaacatacatcgggtggtgacaggcactaaagacaaaagacctatgcttaatcaggaagaatgtcgtatacaaaatattgaataagagttataaaatagaatttagactattttgataaacttagggggaatgggatgaagaagcaactaattgctggtgctgtgatgttgggtctatttgcaacaccgatggcagggtctgcagagacgagctggaagaacgtaaactggaacgaaacgatacaggaggaagatggtagtccgtttaatagcgaaaactatgattttgtgaagtactctgaagtagacgaaaagcttcaggagattgagaaaagcagcaatcgaatcaccgtagagacgcctgctcagtcatcagacggacaggatctttatgtggtaacggtttctgatccagaagcaaaagggaaatttggctaccaaaaagcattgagaaagaagatgtttaagagccctgataaagcggagaagtttatcgagaagcatcctgattttaaagtgccagtgatgatcaatgcttcgattcatggaacagagtttgttggttctgatgcagcacttcaactgattgagcgatttgcaacggcggatgatgcgaagacaaaggagttactggagaatcacattttaatttttaacgtggtggccaatccggatgggcgtattgatgcgactcgctttaactcaaacggaatcgatttgaatcgcgattttattacgcaatctcaagttgagacgaagcatacggttaatttgattaaagaatggaatccgatggtgtttcttgatttgcacggatatgtgaaagcgtatggcggagaaactagtcctggtctaattgaaccgtgtacaccgccacataacccaaattatgaatatgatttgtattcaaagtgggcgatggatcaggcagaatcaatggaagggaatattgttgatcatcggagtgaatacgacaataccaatacaggtacatccaatgtgaattatcaaacgatgacgggcacatacataccgcagcgtgacgacgaagcaggctgggatgattatccaccgatcttcacaccgatgtatgcgatgtaccacggtgcttatggatacacgcttgaagccccaacaaatgactgggacggcgtgaagtggcactacgatgcggtaatgggagcgctggagttttcaaatgataacaaagaagaaatgatcaaggatcagatcgaagtatttaagcgcgggatccagttcgatcacccgtatcatacggaaggctttttcccacaggcttatattcttcctgtagatgaagcggatccaactgcgacggaaaaagcagtggagcacctcatgttcaatgatatcgaagtgtcacaagtgaaaaagtcatttacgttcgatggagaaacgtatcctgcaggcacttacatcgtcgatatgagtcaggcaaaagcgggacttgcgaatacgatgctgtgggatggggaagacatcacggatattactccggcaatgtatgatatttcagcatggaatcttcctgaactttggggctttgaggcgattgaagtagaggctggaagtttctttgacgtaaaaacgtttgatgtgaagaaggtagatggagaaggtctattaattggggatggcccttatgtgatccaaaactcctctgtaaaagcagtgaacctggtaaatacactcattgataaaggctttgatgttcagtggggagaagatggtgcgttctatgttgatgaagcaccgacgactgagttgaaaaagcttgtgaaagaatcgggtattgaggttgcgacagcctctttagtggaaggaaaagaactcacttctcaaaacgtaacgattttaaaagatggtgggatttacaaagcacaatctcatgctggaacacgattggcacttgagcgtttaggttttaatgtaacggaaatcacgccacgcgaacttgcggaaaatggtcttggtgatacagatgtattcttctatagtggaacgtctcgtttgatctcctacaacaataccgaggcgaatgcaccgtttgggttggagaacgaaagccaataccaggcgtttaagcagcaggttcaatcgtatgtagatcgtggcggcaagtacgttgcagtaggagctggtgcatctgatgcgtcgaaaaagcttggcgtaaccgatgtaacggtgaacaaaggctactcaaacagcaacggtattgtaaaagtggactacggttctgaacttttaacgtcaggatatggattggatgattacggctttgtgtatcaaccggtttggtattcgaatgttgaaaatgtcgacgtgcatgcttcgtttgatacgggagacttctttgtagctggtcactgggagaaccgtgacgctgcagaaggtcagccggttatcgtaaaagaacgtgatcaagacgtcacgttgattggaatagaagctggtttccgtgatcatacagatgatctgttccgacttctttcgaatgcggtgtttagtgagtaaagcaggaatcagtgagggaaggtcctcactgattcttttttattttatctaatttagcagggaaaaggagaagtcattcaaagctgaggttcatgtatttcaattatgcataaagctccttatgggcatgatgagcttatacgtaagaaagaggtgctcatcatggaaatagtaatggatgccttgaaggtgatctttcgaatcgtgacgatccttcctttaatgctggccattgggctttacatggggaagcgctcgatcggagagcttcctgtgtttgattttcttgttgtgcttgtttttggtgcggtcgtaggagcggatattgcagatccgaacattgaccatattcacacagttgtcgcgatgattgcgattgctcttttgcagaagctcattattaaaataaagcttaaaaatcagaaagctggaaagctgtttacgttcgaaccgactgtggtgatgtaccaagggaaattcctaagggacaatatgaaacacatccaatactcgatcgataatattcttcaaatgcttcgtgaaaaagatgtctttcatacagatgatgtggaactggcaatcgtggaggcgaatggacggcttagtgtgaaattatatccaagtaaagaaactccgttgcgagaagatatggcgttttacaagaaggggaatgattatgagattcccgttatcttggatgggcgtgttcagaaagatttgttgaaacatattggacgaaccgaagcatggctgatggacgagcttcggaaggctggggacataaaggcatcttctgttttttacgcgggtgttactggtgagggaaagtttgttatttctctgaaagatcaggcaataaaagatataccacctgttaaccattgaaatggggaagatgtttggacgcaggggggataatggtgaaggcgtgtcagcgatgacacgcctttttcatatgtttgatgaaaacaagataattgatgcgttttcttatcgtgggacgaggaactattgcttatgcttttttcggtgttgatcttcttcttttgtttcaagcatgccatagtcaccattcatcgcctgttcatcttgatcgacaccaagatcagcttcatttacgtatgacttcttaagagcagttggctggtttgcaaattttttcttgtttaatttcattagaatcacctctagtgattaggatggcttaatggtggatggatatacgtattgagtgggaggattcgggtggtgacaggcactcgcgaaacaggcactcgcgaaacaggcactcgcaaatggtgtcgatacaggttaatgaaaggcgtcattgcgattgttgttattgggatagcgcttattctagtaccaacaaatcataagaataggtatcgttaagccttaaatgcaacaatattgcaatttaaagaggagctctttcttacgacatagaagtagttttaagtttgaaggaggttttcacatgaattatgctgtgtctatcactgatacaaagaagacggaagaaattgaacagagtgggttaacagttttaaattatcttgaatcctatcacgagtctttgaaccaaattacgtcgattgaagagccgccaagaggcattgttttccacgatttagagtcagctacgaagctgtattcaacaattccgctgccagcttatacgtcgagagatctgattcatctcacgccactattggaaacgtggaaacaaatttacttaacaacaacgaatagcgtgaaagaagtggaagagtattatcggaatctcgagatggtggatgtagctgaaattgctgctcatgaattaacgcatcatgcggatttctttcattctgagtttgaagattgggatgggaatgcgagtgacatgtggtttgaagaagggatctgtttctatttaccgcgtaagctcttaatgtctgaagaacggtttgagagagtgatggaggtagaacgactgttgattcaggcttataaagaagagtatggcgagtactcgttagatgtctttggtgaagcggggtatcgaggtggagataattttgattactctgctgcgttttatgactactggagaagtacgagaacagttatgaggctaatcgatgagtattgtgaaggaaatgtcgagaagttgatcagctgttatcgagagtgggtagatgatggagagaaaggacgccttcaggatttctttattgagagatttgagctttcagaagaagtggggagagaactttggctacatactcaagcgacggtttaagtgatgaagacacacaagaaattttgtcgacaaattctaacagaaagcgggtggtgcctggcaccgcccgctttttctttataacgcttctctaatgactttcttgtagtaagcgacggatagtccactaaatatcgagtacagaaacgtataaatccccatcacgatcagcatgggtgtatagagttcggttccgaagaaaaaccagccggaacggacggcgaaataaccgtgtagaatgccaacgacaagtgggatgccgaagttcaccatctgcttgctgcgaatgccgcgtgaaaggtccgcctgcgtgaaaccaagctttctaagaacggtataattcggacgttcttcttctccttcattcatctgtttaaagtagagaatgcagccagaagtaatcagaaacgtaagaccgaggaagccgacgataaacatgataagccccatattttccttttgctcttggaaggcttcgtactgggagcttctcccctggtcatcttcaaaggaaagtgactggaataagtcggtggcttcaggtaactttgagtcgttttccacattaaagccagtataggtgagaggttcatcttggatttcttcatccatatccttctgaagagccacaaatgtcgtttcatcgacaacgaccgtcgggagcccaccatcagaataagtataaggaaggatgtagttctgtttgagaccaagatagttctgagcggtcacttcttcttttccttttagttgaatgatcccctcgttttcaaagctaataacggtatcaagaattttactaaagccagtaaaaaccgcttcatcaggggatacatcgatatcagtaagggtttcatcactgattacaggtaaaatcatttcactagcatcaaatgcagtgttagacggttgtttcgcaacaatgtctttagttaaaaccgttgcttgaagtacgtccaactcattggtcgtgaagtcgtagcccttttccttcagttccttttcaaaccgattcacattctgctcttccgccagtgagaaatggtctggaatattttgtttagccgttttttctgctgaataatacgaaatatagctgagcgaagaaagggcgatcgcgagtgctgaaacagtcgtaatgattgtaagcagaagcgagtttgatttcattcgaaacatgatcgacgatagcgaaagaacatcgttaatgttcaaatagccttcttttcgttttcgaagcaggttggcaacaaaacggatcgaccctttgtagaaaaagtacgttccaaggatgacgcttcctagaatgaaaatcatgactaatagaagttcattcatctctgaaaaatcgccatcaaacagtttactggatacgtaatagccagtgataattaagacgagtccaagtacgcccatcgtgatttcccgaaccgatatccctttcattcggccttccgttttcgacgtgacccggaaaagcgagagaatgctttgtgccttaataaagatccaatttgttagcataatgacaccaaaaatggcgaagaaaacgataacggtctgcacgaaagccgcggtggaaaagtttaagctcgcgacaccatcaatcccggtcgctttgaaaagtaccatttggatcagcttggaaaatgaaaagccgacgaaaatgccaatgagcatagatccaatatagataagcaaattttctatcgttaagattcgaaagatgcgtccttttgtcatgccaattaattgaaacagtccaatttctttgccacgtcgcttgatgaaaatgctattcgcgtagacgagaaaaacagtaacgatcacaacaagcatgacggaagctgctcggatcgctgcggccatcttagtcgaggtttccatgttgtcgacacctgggtcatattgaagagtgacgaaggaaaagtagagaccgacactaaagatcagggcaaagacgtacaggtaatagttcttcaggttcttctttaagttcttcagaatcatgtgattaatgttcatactgaacaccaccgagcacgccctgcgttttcataatgtcttttaaaaatgattggcgagattcagtccctttattaagctgggtgtaaatccggccgtctcgaatgaaaatgacgcgactactgtagctagctgcaacgggatcgtgggtgaccattgcaatcgtcgcttcccgcgtctgatttaagtcgcttagcttattcaaaaggtcagatgccgactttgaatcaagtgccccggttggctcgtcagcaaaaatgatgcttggattgtggacaaaggcccgtgcggctgaagtacgttgcttttgccctcctgagatttcgttcggatacttatcctggatgtcatgaatgccgagttcactggcgagcgcatcaaatgctacagttgcttcttttttagaaacttttgcaattgaaagaggaagcagtacattttccttcaccgttaacgtatcaagcaggttgtattcttgaaaaatgaacccaaggtgacgttttcgaaattcagcaagctgtttttctttttgcttcgtcatttcttgtccttcaatcttaatcgatccaccacttacgcgatcgattgaagagagcacgttcagtagtgtcgtttttccagagcctgatgcgcccatgatgctaataaactcgccacgctcaatcgaaacatcgattcccattagcacatcttgtttcataaacttatttccatagcttttttggattttgcttgcttcaagtacgttggtcattaaatttcctccaatggattgctgatacttatagtataaagagggtcattccgtctttccttcgattcgccgaacaataagagaaggcgtgtgacattgttgtcacatgcctcgtatttggtcaaaatcatttcgttctgggaaagtgagtgtaaaagtagtacccattcctgactctgagattacatcgatgtttacttttaaatgatctgcaattttccttgtgagatagaggcccattcctgttgcagctgaatcgtgatggttcgcagttgacgtaaaacctttctcgaaaatgcgaggtagatcacgttgcatgattccacgtcccttgtcctttatgagaaggacaggttgatggccattcattttgctcacaatcgaaatgtcactgttttcactgtatttcacagcgtttgtcagcagttgacggagcataaaagcgagccatttcgcatcacttaaaagttcagtgacgttcaaatcaagatcaaaaccaattccccgctgtttgcaccaggtacgtaagggagtaatctccccaaccaatattttttcaagatttattttttcgatatacaggtcattctcaatcgctggcatacgtttttggtgaagctgctgatcaagtagaaagtgaatccgaagccattcgtaggtaagctgctcgtttagttcacggtcttcgacacggtccatcagcaaatgaagcgctgtaagaggtgtttttacttcatggatccacgtgatgagatcatctttttcgatttcaagctggtgtttcatgtggctggactcgtctttaagctgatcaatttgttcggatatgacttgctccaccactttttcaaatgggcttgtcgcctttgggatgcttgtaacatcaaagttcgtttcccgttcttccagctctttataaaatgtcgtttctttaacgaatcgtaatagtagaaaaagaaagaagaggagagaagttagaaaaactgcatatagcattgagctgaaagggattgttgcatcaacatatgtaatgagaagaaagcacgcttctatgaaaaggataaatagtatccaactacgtcgttctttcaaaaaacgccacatcattgcgtttctagagccatatagccctgacctaccttcgtttggatagcatcaccaagttccatttctgcgagcttttttctaagacgattcacattaacagttagcgtattatcactcacaaagcgctgatcgtcccagagacggttaattagttcatctcgcgtaacgattttgttttttcgctctatgagcataaggagaatgatcatttcatttttcgttaactcgatcgcattgtcatcgatcgttacgcggtttcgctctgaatcgatcgtggcaccatgccaggttttgagcgtatttgtctcgctattgtaattgtaaacgcgtcttaagatcgcctgaattttggcgacaagcacctcgaagtggaaaggcttctggataaaatcatcagccccaagattcatcgacatcaccatatcggtaggatgatcgcgtgaggagagaaagataatcggaacattcgaatgatcccggatcatccggcaccagtgaaagccgtcaaactttggtagttgaatatcgatgattgtaaggtcaggttttacggtagagaattcttgcatcaccagactgaagtcgctaatcccatatacctcataagaccactgctctagtcgctccttgatttcctggaagagtgacgtatcatcttcaattaatagtattttaaacatcctgtgcaccacactttgcttcgttatctatgttgattatagcaaaaaatgggaagatgatgacgggatgagtgcgaaaagaaaagagacttcagctagaagaaagctttccacatcaggcgattcagtaagagggatttgtcgtggttaaagtttatgtaaatcgagagctaaagaaaagaatgatgctgaaaaatcatgaaaggggtcaggtacgtacctgacccccctcgtggacatttgtctttttttacataattctcctgtcttgatcaataataagtgaaaaccggatgaagcaaggagttgatcctatgtatgaaataaaccagcaagtgttacgagaagcgcatcaggcttgcggagaaatagaaaccattcgtcagcagttgttagatgcaagacaacgaggagatttggatttagctcaacggtttgagcaggaattaattcgagcggagcaagttgcgagagagtgccagcggaagcttcaacaatcaacggcagggagccttgagggggagcagattcttcagcagatcactcatgacatacatacgtgtggtcagactctgcgtcagcaataaaatgaaaaaacatagcaaagcggctaacaacttaatgtcagccgcttctgtatttgcatttagatagtaatttctatctttttcaacaccaaatgtttgaccattccccacctactaccgctgctctaaatccttcgctgtctggctcatctgtacatttttttcatccttcaatgtgccaaaaagcacatcgacgaaaggcgtcgaaaccccataccagtagttttcgtttttataatgatggagaacgtgcgttttcttgatccactgtgcaaatcttgtttttggcttaaatggtcgatgcgcaatgtaatgcttccattcgtagacgaagaacatagccagcaatccagtactaaaactaagtgtgaagagaagagatccggatgcccaatagaaaatcaagcaaagaagcaagaggttcggaaagctgtaccagatcggtagaaacaatagtttcaaatcattcggcattttatgatggtcatagtgcaaccgtttaatgagtttcaaaagatacggattcttaggtgttttaatgtgaaataaaaagcggtgggtgaggtattcgctaaacatgtagctgacaatcccgatgacgataaacactgggacaaggggagagagcgtcgttgtcagtaagaagccaagaacgataagaaatacaccaaacatgattaaaatatcaagatggaagaaaaaatcacgatacaatcctttcgctttcacactacacgcccccgttcattttcgttttccaaagctccaaactggttgccatcatttgcttcgtcagtgattcagcgtgatcaagatctccttttaacgtcgcttcgagaaattgttcataatacgcttttgatgctcgacgatgagaaggttctagaaagtatttctcagccattttgccatagatgtcttcgaaactattcaagattagaagaaagaccggattaggggatagttcggcaatgcttttctgtagcttccaatcaaaatcagcatatgatttaggatcgtctgttagctcttgaagtgggatgaaaagtgaaatgatttggagactgtgatgaagaagagaatctcggacataagcaggtgttaacgtaatacgaagctccagcatgtaaacaataaactcatcaggaatgtcatcgtgctgctgaaggatattcacgatggtcattaaatttccatgcttccaataatcattaacaatcgctggcgctcctttacgaatcgtaatccacccgtctcgttccaggcgctgcaaggcttcgcggatggtaggtcggccgacttgatagtgagtagcgagttctcgttccggagggagcgagtcatttgtagcccattcttgttctaaaatagaacggatgagcttttttttaatcttttcggatgatcgttctttcaaagagcggttcacctcagttctggtaagaccagatttattattggtaataccattataatatgaggtgaattaattatgtgtttgatgtttgaaaattctttctttttttattttggaaattaaaaagctcaacgaaggagatcttcgatgagctaatagaaaatgataaaccgattgggcacctaacgttttcattatagcgttcctaacgtaattgaatagaagtagagagctgttgatccgcattctccaattgttgaaccgattcacatacggtctggttgttcaaggtaaggatttctttgtaggcgtttccgacttccgttagcatatggtttatctcatttaatcgatttacgacatccagcgtatttccttctccggtgttctttggtagctctgcgttaaaagcgcttagccttttctcgatttggctgatcgattgctcgacttcactaaactttattagcatttcgttactcacttcgcatttctcctttctctcgcttcttcttctaatcgatgtatttcctgggttatgtttaattcaagtgcttgaatttcacgacgaaggtgatctgctttattttccattgtatttagtgcggaatttacttggttaattgatagatccagataagccattttcatatcttcgcgtatattttggaatgagtttgctaattccccggcccacgtagtaggagttagctcaggctgatcaacaagctgtttattttgaatgaattcactttgtaagccatctagttttgttaaactagcttgaagacggatgagttgagctcgcttttcagctatttctgattgtaaatatgataaataggacatttgcgctatcccctttgtaatgttaattagaaaaatcatactcaagcagtagtatatggtatcaaatggaagcgttctggtaaataggttgttctacctgttcgtgagactgacgtacggggtatttgtacctatacccagattctgtaggattttaaccatattattgtaaaaatggtaatgtgattaaatgaagagattcttgatctaataaaagttacgagtcttccaatagaaaggtttcattttactaaacgtcaaaagattactatagttcctaaccgggaacgtggtagataagcgcggtaccctttttagaaatgaatgttcatacttttgccataacataaacgagattggcactgttataattaggatagaagtcatgaatcagttcacctagaaaaggaaagaaggaaaaatgatgagcacagaatctgaatctaaactattgttttcattgagcattgtgcagtttatcctatctgcgttaatacttttacttccgattatgtatctgattactcctgaagaggagaatttgctattatacggtattatgggatttggtgtgattaatttacttgctggcatttccaaccggatcaaaggtcagcaacgatctggtatgttttattctattgctggcgttgtgctgtttgcgattggtgttagtttgatgttgttttaatttaatggattccaataatagacagacctattctcataagagagtaggtctgtttttacgtttcctctatatttcctcacttagcgtataattcactctcgccatcatgttgagcgtttcttttctcacttcaaagtagagttgttcaaattcagcacgatttgttttcggatcctcaaattgcccgagctgtccccacattgcttgaacagcttgcatgttttcaaaaagctgaaggtccattgccgtttgaggggctggagggaggagcgttggtgagccaagactctctaattcttctaaaaggattgggagtgcttcatgatcgtaagcctgagtttggacaatataatcgagatcactaagtgttggagcgatgaggtacgtcatcttagtgatgcctctttctaaattcgtagcttcttcataagtgcggtaagttaattcttgaccttgaagttgagctggtatggcatcaagaatcaactgatacgcttgatcaacctgatcctgatcagaaagttcgtaggcttcttcttctactattccgacaaacgcatctccataatttgtgatgttgcgaatgttttcattttctccgcttacaatggtgcgaattggtttcttatctaaagggaaataaatgcggccattctcatccatgtattcatcgacaatttctttttgagtatgttcgtactcgatatttccgtcttctccgtacggtgtttcaatcgagacggtaggaattcgtaggaacttcttttcagtatccgttaggctattaggtgatgaaggtgaatctggggtgggcgtagctgaattagttgagggagtatcctttttgtttttcttaactgaggacgatttttctgatgtgttggtatcgctagcagctgtttcttcagtagtagcggcttctgcttcttcattttgagtcgcattttggttgttattacaggcagctaataatccactagcaagtaggataagtaggtactttttcattcgactaacctcacattcgattttgtggtatttcctttaatacccatataatccaatgctaaacaactggggagcggttcgacaggaagttacataaatcgggtggtgacaggcaccgcaaggtcttcctgggtcttatctactaaaaaaagtatttgaatatttcggaacattcattataatcaagataaaggtggaaatatttacaaggtgacggaggacgtggtgaaaagtcatcttgatgatcgcgagaggaggtgatgtagaaagtgaatagcatacataaaagccccagaatgttttgtcttggtggacacattctggggcagttgttggcgtccaaaccaacaatagtacaagtatacctttttcttgtacaaagggaaaccgcaacggaattaggaagtgctccattaccaattgaaaacagaagggaaaagcaaacatggtcaatatcgaggcaggaatcatgaatgactatgaaattagtaaatcaactcgggcgattgaagtggcgaaagaagttggatttagttcgagaatttatgatcgaagcgggatctatttatcagaaacaacgccagtcgatttaattaggcaggcttgtcttgaagcaggcgtcacgtatgaaggacgaagaaaagcggttatctatcatttaaagtacgaacagcagacgccgattattgtttcgaattggaatgcgatttcggcctttccgactgaatcacccgaaagcattgattgctgctgggtattttatcagcacgttcgagatacgtatgcgattacgaaaaatacaacgaagatcttgtttcaggatggctttgaattaacggtgccggtttcgaaaggcagactacaaaaacaaatggagcgcacggggcgctgggttagtcattattcgaataatccggtttattgttgagatgggcgaggggtcaagcacgtgcttgacccttattttctgttaaactatagaataataggttgttattggaaggtggaggaagaatgggtaaacccatagtttctgacaatgaggcattagcgtatttaagaatgacaactccaaaggaaaatcaaaattctatctttttcatggttttattttttgtagatattattggattctttccttatttggtaggcccattctctctaacattctttctagctgcgctcttgcctggaatggccattaacgtatggatgctagtttatgtcctgactccttataaactagaaggttcctatgatctattattagggtgtctatccattgtttgtagctatttgtattggctaggtattgaaaaatttatttatgtgaatttaggtgctgaagggaattctttcttttggattgggttgtttattttaatctttcttaccactttcttttatttctttacacgttattatgtgaagaaaggtaaatataagcgtaagcgaacggatcggcagcacttgagtgggtttgaaattgtcatatccgcagccattgtcattggcatgcctcagcttttggattccatgagtttttttaaagtacaaaatgcttatctacttatcgttctattagggttcatgtctattattactttgttcttgattggaagtttccataagtatcattttatcaaaaacaatcaggacctcgttaggaaggctttcactaactatcaggtattgaagaaagagagaaaggcagtaaaggaagactatagtgttgcggttataaaagaaggcaatttaacccacgaggagatgaaggttttaacagatgaattaggagaattctcaaatgtttcttcagttaaaaaggtaacttccttgaaattagatcaggaagattttcataacgaagaaaattgtaaacctttttgtcttgttgtaatgaatgtagagcaggggcagattgataaagaaataaagaagatggtcagaataaagcgttggaagtatttctttataggaatccctgaggaagagtatgaaaaagtggaagatcgcgttctctttgatccgagaaacgcagtctttcaatcaggagatatagccgatgtgagaggttttttattgaatgaaatgagataggagcatggagaggggtcaggtacgtgtcagaccccatgatctcgcggctttttattgttttttagctagaataggaggcaaccaattggatttaaaacgagctttagaagatcttaatcgaaatgagtttcaaggagatcttgatgaccttcttactcacatgctttaccagattggtagtaccgatcctgccataagggataatctcatttatacaatgtttggaaagctggtgatgagcgattatttaacagaggagcagcttacatacttgttaaccatttgtctcgatgaagaacaccttttttatcgtatcggtgaaagaggaacagactcggttttcacacgttctttctcagttctggtggttgcgctcattttagaaaaagatcgtgagacaggatttcttaatgaagatcgaatggaagctgcaacggctaagtgttttcggtttttacgagaagagcaagatacgcgagggtatgttgagacaaaaggttgggcgcatagcatcgcacatggggcggatgcactgactgaagtaatcaggcatccgctatttgataatggaacaatggatgactgtcttgacgtgatacaggagtgtctttttaaagaagccacaacgtatgtagatgatgaggatgaacgactattgtttgcgatcgaggtccttttggatcaggggttgagtgaggagcaccttagtaaatggattgagttgctctcaacagagttagaaggactgtttcagcagaacggatatagtgttgaattcttccatacaaaaggaaatgtactaaggtttatgaaaagctgttatttcaggttaattatgaaagaggatttttttgaagcgaggtatataattgaaaaagttgtggagagatggacgaggaagatttatgggtgactgattaataagaaacttccccgtaaactagatcgacatctcgtgacctcttttcatatagcttcgcctcgtcaactcatcccagataaagaataggacagagcaaatactcgcccatagaaaaaaggctggtgcaacgaaaaaggttgcgaagccaaaacctagatgaatgaaaccggaaaggaatattcgaaaacgactcgtttttacggaaaggtactcagccaaaatagagacgggtagtccgtataatacatttccaagcaagctatagagtaaaacaacaataaaggacatgaaagtgataaatgaaaatgcctccatgcctgccataggaagcgaagagaaaaagagtccgattgaaaacgtaatcgatgtaaggagagcgactttgagtttcctcattttattttggaatacatgttttctaaaggcagggaataaaaatgctgccgctagaagagacagaagcagttttagaaagggcgccgtctcggagatcgagatgattagaataaaaatcaaaatcgaaataatgagtacaaagctgtttcgcttaaacataacatctcacctttcctcgttggctgtatgaagcgctcgtcattagcgcagtgggggtcaggtacgtacctgacccttaatgctcgtcatcttcatccattttccacgaatagcccgatctccccatataatagaggaagcctgcagaagataagattgtgagaatggcaatgaacagtcccattttctacacctccttaacgttttgaaaagtttagtgaacagcatcctactttctctgctgaataattgagtttgctatttgcaccatgtcttctttagtgaatgcagacgcttctcctgatggagtgaatccaaccactttataaagggcgttttcgttctgacttacccacgtcatcgttaacaggtgaccatcttcatcttcggagtagaatccttgcatgtcttgatcaagctcctgatttgtttcctcaatagaagagtcaattcccttctgatccttaatcagtacattcaaccgcttttcatcttctgcgtaataaacatcgattccgtatggctcaaatttcgtttcagacacagcttcgacatcactcacttccaatgggatcgtctccatatcggggacggtaacttcacttctgaattcttcaggaagtttctcaagttccgtcttcacctctggataattttctttcaaggagtctaactgattttccgtggatgtttcagcttgcccactacaagcagcaagaattaggattaatccgaataaaacggatgtgaattttaatttcatatgtaacgcctcctatatcatgtactacgagagtgctgtgaaaaagtttcagatttcctaccatttattagcatcatataacgagtctcaccctttaaaaaatgtaaaaagtttttgacgttattccctgtctcccttataatggaaaagtaaaatgttttttacatttgaagaggtgttgtgattgaaaaacacgattcgtttgatgagaaaggaattgaaattttctcaagaagagcttgcaacccaatgcttggtgacccggcaaacgattaatgcaattgagaacgataagtatgatcctaccctggcgctagcttttaaattagccaaaagcttacatacgagtgtggatcacttatttcaatttgagggggatggcaatgaaactaagaaaagctgatgaaatggaaaaggatcacaatttgaaatctgcgcgaaatgcgtttgtcttttatacagcagccctattgatctgggcattgattcacgtgattcacacaggtgacacgggtatctcgatgacaatcttattagtcggatcggcggtattctggttttctcgatcgtttctatacaaaaaaacgcagtaatcggtttagggtacatgaatgactcatttaatagggggacatgatgcttcaatcaaaaaagctaattcaaatcattgcgctacttgtaacgagtactttggttctggttgcactttatcggtggcttcgttttgacatgatcgacggagggacgattttctttagttttcttgcattaagttatttcttcaatacattaacatggggaaatccagaaggtgctgaagcgaaggacgaacgagaagaacacattatcttgaaaagtactaaggttggttattttgttcttatgattggttctccactcatcctgtttatctctgaaggggtaacaaatttaaatgatattgataattacccgttactgctcgtggtatgcctcacgttcgtcacgctaccaataacggaattcatttatgccaaaaagtatcgatagagatcatagtcatagcctatcgtaaagaaaaactaaaaagagcggcgaatggtctgcgcattcgccgctcttttctaatgtgaaatggttactctgttttaagctagctcgcgctcataaacaacttctttcgtttcgatgtcgatcgcgtctaccttcattttgataacctcgttattatcattctttttcgcaccccagagacggatgtagttctctgttttatgatctagaaaatttacttgaaccgttcttacttcaccaatttccacttctttatcttcaatccaacattcttgaaacaccatcgtttctctcggttggcttaaaaggtaatcctgcataatctttacatattcagggaaattcagctctgcattttcaatacagatctcgtgaaaatcattgaaatctgtcatatggtagcttgcttttggttcgttattcattgtttctcctcctacaggtctcgtttgataacatactctttccccaaaagtgaacgttaaaaacggctaaaatttgtgagaagcgctcagcggatttattaaatgaaaaacaacgctatcctaatagagaaatgacgtggttttgtcatcggaacttttttgattcgatatgctgaattaagatgtcattggatttttcttacgaaaagaagggatttcaatttaagaaaagaagaaagtctgagcaactttaaagaggtgaatcgaatggataaagttgtggtgtgagaaggagatttttcgttaaattaaaaaatgaggaatgatctcgatggcacaaccctatcaagtaatcgatcgttatccaacctacgaagagtatgtcagcttatgtaaagcagtggggtgggaattgaattttaacgtggccgaaaaagcgatacgtcactcgctttatgcggctgtcatgatagacggtgaaaacgtcataggaatggcaaggattgtgggagatggagcgatgtatttttacattcaagattttgttatccatccagaccaccagcggaacggggcaggaaaactgctgatggagaagctcttttcctatttgaaagagcatgctccatctccagcgttcattggactgttttcgacggaggcggggagcggattgtatgagcaatttggctttcaaccgcgtgacttgcaggggatgtttcgactaacgccaattgactagtgggatggtggtgtcttcaacggcaccgccaatttacgataggtagccattagaatagttgaaactttatgggcatttgaaccgtatactataaaaaagggagggatggacatggaagcattttttgtgatttttctagttattttatttattgctcttgggtctgccagatcgaaatccttgaatcatcgaggcgggggaacggatcattcaagctactatagcggaagtcatcatagttcgggttgtgatggtggagacggtggtggctgcggagggggcggcggtgaatagctgtcgtcttcatttcaggagtgaatgagttgaattgaggtgatcaagtgcttaaagcattacgcatcagttgcgccattatggcgggtggatttgcagtagctgttttaactggaagcatctttctattgccattgatgctcctttcacttggtcttttcatgacggtaacgggttttgaggaattaaatcgtggtcaaagaagatcagcgaaactaacgttttgcgtttctgccttgattattttcgctgtgttttttaccttctagggctattagtaagcctatcaaaaaaagaaaacagaactattggagcgtaagtggtagaatggagagagttcattaaaaaaacatacataaggttgagagagagagagagactttccatactgaagggagcaccatgtgaagacggagattgtccaattaacaaaaccaactgctcaatttgtggaagtcctgaatcgttgggaaaatgatcgggaattaataccgcttattcgtccaaataaaagtcaggaggaattagatcgacgcgaaacgatcactcttgaaggggtaagggatcgcctggaatatcagcaaattttccagatttttgtgaatcacgaaatgatcggtgaaatgaattatatggtagaccctccgcacctctttaaacaagaatcaggaacggcttggatcgggattacgatcggtgaacctgaaggcaggggcaagggaattggctttgaagcaattcaatatttagaagaacacatttaccaacagggctttaaccgcattgagcttggtgtgtttgagtttaatacaaacgcgtataagctttatcaaaagcttggttatgaagagataggaagattagaagatttcacttactggaacggaagaatgtggtcagatattcgaatggaaaagtatttgtaagatcatgaacagtgctgcttgccagagttttggttgagcagcactttttatgtttagggtacaagatgaagagaacttgaaagacgataggcgcgctcttcttcaagagaaagaaagggtcggtttggtgatgcttatcttttggataatagccgagcattttcagcactttatcatcgtttagaaaaaggactttgtaagaaggaagatccaggtcggcacttttaatactctcaacgtctgctttttcaagcgcttgacgtacctgatcgatggtttccgtggaggtgatgttattaatgagttttccttcacgctcatattgttcaggagatggggacaagtcactcactttgataacgttgatctgtgtggcttgattaagaagctgaaattcgtcattttgacagcttaagagtaagagtaggaaaaggaataagatgaagcatttgcgcaatgagttcacctcgatttgtggatgcggggtcaggtacgagccagaccccgtcctacttaagacctataatagcacgacgccaaccataatgagcgcgatggagatgaattttcttctggtcgctttttcgttgaataagaggagacccgcaatggttgtgccggcgatggagccgctccaaagagagatgtatctccatacgagcagtcctgatcttcttaagctattatcccaatcgtttactcaactttaacgctgtagcggtaaagtgattgatacaacggtcccaacacctaccgtgctatcaaagtgaatggtgccatgatgttcgtggataattttataacaaacgacaaggccaagtccggttcctgtatctttgtttgagaaaaatggttctccaagccgttccaatcggtcttttggaatgccgacccctttatcggcaatttcgataaacaaatgggtatcggagttgcaggttgtgatcgaaagcaatccaccatctggcatcgattcaattccatttttgatcacattcatgagcacctgcgtgatctgatttttttcacagtgcatcataagggaaggcgtgtgaaaagcggttcttacattgactttatttagtaaaagttcaggattcataagtgaaacgacgttccgcgttagcgccataatatcgatttgctgatacgtgacagcctgcggtctcgccagtgagagaaactcgttaatgatcccttcaattcgatccatttcagaaagcatgagctcaagaatttcctcgttaatgcgatccttgtaaagttgaataaagcctttgacagatgttaatgggttgcgcacttcatgagcgacggctgctgcgagctggccgattgctgagagtttttctgaacgaagaagaagttcttcggtttttttacggtcgcgaatatctcgggtaatggcggacatcgctgtaacgtttccttcgtgatctttgatgggggagtaggtgacgctcacatcgatcggtgtgccatctttttttactcttactgtttcaaaatcaacaactccctcaccaataaggacggctttggtgatgcgatttgcttcttctttattttgatcaggatagatatcatataaatgggcgatcatgtccccatcgttgtatccgtagagtttcttaaaggctggattcacctgaatgatttctttgtccaggttgctaacggaaatcgcatcggcgttattggtaaagatggattcaatgagctcctgtgtttcgattagttctcgttcgacttctttccgctcagaaatgtctcttccaatcgcaataaggtattttcgctttccattggaatggaaggttggtgctttaatgatttcgaatgtggccatttcgccatttgcgagttcgagttgatattcatattcgacatttgtttgttgcttccaggctaataggtcagtattcacgttgttttttagtaaatgatgggcatcgatgttgctacagtttaattcttcgcacgttctccctttgtattttccttcttcaattccaaaaattcgtttggcgtatgcattcatttcaatgattttcccgttctcatctttgaaaataataaattcaggaatggaatcaataagcgagcgtaattgtcctgcctgatcgagtgcatcaagctgtgcgtttttgaaatcagtaatgtcttttacaattttataagcgccccgaaattggccgttcgtatgaatggggatggttttgatgagaaggtgtacgcgatttccatggacatcgctcgcttcaatttcgtatggacgctgatcaccgtggagtgctaattcaaaatgtcttccgatcgttaatatggtttcatactcaacgacctgggcaggaaagtgtttaaggttatcaagagaataaccaagcatttgatgaagcgcctgattaatgagcgttagttgcaagtgttcatcgataaaagcaatcccatctgggttctcatcgattaaagaatggaaccgctgttggagctcttctgttggaatgggtttctctttatctatgttctcttgtgagatttctttataaactgcttctttatcttcaacgatgatgaacgtagctaggttatcgtcaatccgagagaaacgaatcctttccttcgtgtagggaagaggtagcgaaataaattcacctaacggcactgtaaacgcctggtcgagatagctgtttagttgattctgttccatgagtagaatggtttcgaacgattggatgtaatcgatctgttcaaaagatgaaaatctagaaatcgcgtattcattacgatagacaataccaccattccgatcaaaaacaatgaggggtaaggggatggcatcgtaatgagcaaaaaaggaagttgttatcattaaagtaaccctccagatcaagtaatctattcatctagtataacaaacgaaaaagatgagagggggaaaagggggggcagtgagggggtcaggttcgtacctgaccccctcacctttctgcaactattaagaaattcacattgttgtttcacacataatactgtatgatacatagtataaatagtgtacgacatacagtatggaagttggtgaagatgtgacgctgttacagtcattaataacggagcttagaagaggaacgttaacgcttgcggtactcagccaattaaggtctcctcaatatggatattcacttgttcagtcgcttgaaaagtcaggaatctccatcgaacagagcacgctgtatccacttctccgcagattagaaaagcaggaacttgtgacgagcagttgggatacgacggaaagcagaccacgtaagtattacgttctaagtgagtatggtcgtgacattttcgagcaactaaaggcggagtgggagaaaacgtcaagcgagctaggttccttattgaaaggggaggaagagcgtgaatctgattgaggtttacattggagaagtgacaagaaggctacctgaatcgaatccccaggatattgcactggagttaaggtcgacgattgaggatatgcttccagaaaacccaacggaagacgacgtgaaggatgtgctaaatgaacttggcaatccagtgcagatggcgaatggatttcgcgattggccgatgcacctcattggtcctcggtattttgagcactactttaagatcattaaaattgttctcccgattgcactaaccgccacatttatcgtgttcatgacggttaatgtgattgattacaacggaacagagtcgattggagccgtcttttttaatcttcttggtgatgcgattagtggtttatggaatactacgattcaaacgcttttctggattacacttgtttttgtcattttagaacgaaccgatttgaaagtgactgaaggtttccacacatggtcagcagatgagttaacgaaaatacccgttataccgaagaaaaagaaagtttccaagacggagctatttagtgatcttctctttgtagctgtgtgggcaacgctgtactttaacgcagacaacttactaggcattattaagaatggcaagatcgatgtgcccttttttaataatgaagttcttttatcctattggcctcttgttagtctttcgcttttaacggcagttcttcttgcactctataagttgttggttggctactggacgaagcgattagcgatggcaaataccgttcaacagatcttagcgacatccgttattgtgatcatgttattaaatgaccagctcattcatgaggattttacaaatttgttatccctctcagaaacgtatgaaaaccttactttagcagcgattggagtattttttatcataagtgcagggatcgatagtgtaaaaggatattgcaaatcgaggttgtgagaatagtagaagtgaagagtatacgaggaactgatgaaaacaggacaagatcacgagaatatttggaaatggcgcgtggaattgaaaagaactaattgactgaaaaaaataatttttaaaagaatcgcagattttgtgattctttttttcgtgccaaaaaaccttgatagtaaagggtttttgaggtgtttatgtatggaaaattcattgaatgaacacgcttcagaaaaattttttaaacgttttcattgatttatgaaataataattcctataataaagaaagttggaagggttttcagagattcactgaaaatatcctttattttagaagaggtgggagttatcatggaaatttatcttttagcaataacattcatatcgattgcaattgtcatcgtaggagtttctgtttttcaatggcatgcgtttatcggtttaacggtagcggctttattcctagcagtcatgtctggtatggaatgggtcaatatcataggttcgtatgaaactggcgttggtggcgttcttggtcacttggttggtattctagcacttggtacaattctcggaaaacttttatctgaatctggtgcaggtttacagatagcgaatttctttattcgcgtttttggagagaagaagctgccgtgggcaatgttcttctcaggatttattattggtattccagtattctttgaagttggtattttaattttattaccactcgtgatttcgattcaaaaagcaacgaagaaaaacattttattgattgcgttaccagccgtagcaggcttgtcgattgtgcacggattgattccgccacatccaggtgcggttgcagcgattggaatttatgaagccgatcttggtaaggttcttttatactcactcataatagcgcttccagcaggtattcttggcggtccggtattcgcgaagtggattaataaacgcgttgttcctgtaggtgagcctgatttgatcaaggtagaagatcagcgcgatccttctacgctacctggaacaggaatttcattcacgacaatcattatgccagtcttgcttcttgtcttaggaacattcgcaccgtttctacctttaccagataatgcggtaggaattttagaatttatcggtagcccactagtggcgctgttactgtcttgtttctttgctttctatttccttggtttccgtcagggattaaacaaaaaagaaattaaaaaatacgtggaagaatgtattctacctgttggatcaatcatcttgatcattggcgcaggtggcggtttcaaacaaattttgattgatagcggaattggtacgattatcgggaacctttcacaggatctctctttgtcaccgctccttctagcatttttgatcgcaggtctcatccgaattgcaacaggttcagcaacggtagcccttacaacagcggctggtattgtttcaccaattatcgcgacaatgtcaggtgtaaaccttgaattgctcgttattgtaacaggtgcaggttcacttatgttctcacacgtgaacgatgctgggttctggatggtgaaagaatatctaggcttaacggttaaagaaacgttcaaaacgtggactgtgttggaaacagtgctttcctttgctgcttttggtggcgctttgattttgaatatgtttgtataagaattgaaagagagagggggtcaggcacgtgcctgaccccctctctcttttttaattacagttattttcctgatctttgatctcagatgtatcgcattccatttgtatcgttgtatgggtgagatcgaacttttcctttagctgttgtcctattgtctggagcaactgatcgcgattagtcgttttgctgacaacaatatgacacgtgaaggaaggaaagtctgaagtgatattccaaatatgaacgtcatggatggattgaacgccatctaacccgactagcgtgttcttcacttcttcaagattaatgttggacggtgttccttccattaatacgtggaaagagtcctttgtaacgcgaatcccactgataagtacgagaatggcgacaatcgaacttgcgattggatcagcgtaattccagccagcgaacatgatgagtaaggctgcgataatcgccccaattgatccaagtaaatctcctagtacatgtagaaaagcacttcgtaaattaagattttctgaagtatcgcctttcataagaatccaggcgacaacgatgttaacgattaagccaatggctgcgatgatcagcataccggtacttgccacttccggtggatttataaaacgttgcacagattcccatagaatatagaaagaaatcattataagggcaataccgtttaagaaagctgctagaatttcaaagcgcttgtatccataggttttatcctgatcggattccttctccccgagcttaaatgcaagtagactcattccaagtgcaacagcgtcgctaagcatgtgtccagcatctgataagagagcgagactatttgttacaaatcctccaattacctcaagaatcataaaggacgaaatgagtaggaaactaataaagagtgcttttttgttagcggaatgtgtgtgtccatggtcatgagaatggttatgtcccaaagtaatgcctccagtcaatattgtgtatgattgatatatgattatgtgttcatgtattgattgtaccactttttgttgagaattaaacaagggggtcaggtacgaacctgacccccttaaaagacaaatgtcttttgagagcgcacacttagtagaaagaaaacatacaattgattttttatgtattgaagcctcattttcggaaacagtaataggatagaggaggttatgaatggtgtcaaaagatcgtggactactctacatcatttggattatcactggtgtgctgttatatcgatttgttccgaaaaataaaattagacatgtcattgtcgttatgtttttcaaacaatttatcacctggtttctagggttgtgggttgttgagaaaggtttgattaagtatccagtaagatttatgaagaaatcaaataaaagtagctttacatttgaatacttcatttatccctcgttctgtgcgatttttaatttaaattatcctgagaagcgaaataaagttatccaatttttttactacctttttcacgttggtttgattactggtggcgaagttttggcggagcgatatacgaatctcgttaaatatgtaaagtggaagtggtactatagttttgtttcacttggggtaacgaattacgtatctagacgtttctataaatggttttataaaaatgaatttgaagaaagtgaaacaggtggatgaatctcctgttaggttgtacacactttcctactaaataacagactgcaattcacacccttccttgtggtatctttcttatggttataaagaaatcagtgaagggtgtttgaatgagtaaaaaagtgaaagtaacgcttcctaaaataccggcagttttagaaaaagggagctttcgtgatatttacagtgatgaagattttacattaatgaattgtgagattacaggagagacaatcgaagacattgaacttgatcaggccattgtttcaaaagttgtatttcgaaatgtgacgttcacaaatgcgatgctacctcgagtagatctgacggatgtgatctttgataattgcaatctttcaaatgtgaacttcaatgaaggaatcattcatcgtgtaaagttcattgattgcaaactcatggggacagattttactgaagcaaatctcggaaacgttatatttgaaaatagccgagcacatttcagtagttacgtggatgggcggttaaaacaagtggagtttaagtcgacctccctgcaaagtgcaaactaccacggctgccagtttacaaagacgtctttcgttcagtgcgatctgaacgaagtgaattttgtgcaaacacgcttaaatggtgtggatattagcacgtgccattttgagcgacttcacgttgaattcgaaacgcttgaaggttgtgtagtatcacaggagcaggcgattgggtttgcgaagttattaggattaaaggtagcggataaatagaagatggcgaggcaggtgcatccctgcctcgccttttttttctttcattgaagattgctagtgacgtcatatagcggggggcaggtgcgttgacccccggtgcgttaaaagagtaaagaagtcattgaggaataggtgataatttgaaataattgagagtagagcgggatatataacgagaagaaacgttaaggttacgcaataggctcatacgattggagggttttatgaacattcgacatgtgaagcagtcagactactatgtcattgcgccacaaatcaatgaatggtggaatggaagacaaatggcagataggctacctaaattgttttttgatcactttacgaatacaagttttgtcgcagaacaagatggtgaaattattggctttcttataggttttctttctcaatcgcatctacgagaagggtatattcattttgttggtgtccaccctatgcatcgtggcagtcatatagggcgccaactctatgagtctttctttcaaacgatgaaaatgtatggccgaaatttggtgcggtgcgttacctctccagttaataaaaactccatcgcttaccacattcgaatgggatttgaaattgaaggcggtaaccgtgtggtaaatggaattgctgtgcactcaaattatgacggaccgggagaagagcgggttgtgtttgtgaagcgcatataaatgtccacggcaggggtcaggctcgagcctgacccctgcttcagcagcaggaattcccaatcccctgccgaactatatttcttgagaaagatacacataatcaaaggagcggtgaacaatgtcttttatgaagaaaatgatggcgcgtgtaggtgtcggaagttcagaggttgatacgatcttgaatcggaatgtgcttgttcaaggtgaaacggtcgatggtgtgattaaaataagagcaggcagcgtcgaacaaacgattgaaaagatcgatctctctcttcacacaacttacgtgcaaaagaaagatgacagcaaggtaacaaaatcggctcagattgcgcggcacgcggtagcgaatcagtttacgattcaaccaaatgatgagaaagaattcccgttttcctttacgttgccgcttgatgccccgatcagtaaagggaagagcaaagtttggctccaaactggacttgatattaagagtgctgttgatccgcaagataaggatatgattgaggttgcccctcatccgtatatcaacgcattccttcaagcagtcgatggacttggttttaagcttcgagaggttgaaaatgaagaagctcacggttttggccgactgccgtttattcaggaatttgagtttcgcgccgcgcacggtgcgtttcgcagtcgccttgatgagctagaagctgtgttccagccggtttcagaaaacaacattcgcgtgatacttgagatcgatcgaaaagcaagaggcttttctggattcttatctgaaatgctcgaaacagatgaatcgaaagtgcagtttatgctaacgacagacgatgtgaaccagatccagcgccagttgactgatgtactaaacaagtacgcgtaaggcattcgatcaaaataaaaccgcacttactcatgtaagtgcggttttattttgaaacgaattgccttttgattcgtatgtgttattaggatcagaatctttgctttttccaggtaactcaactcatgtgaatgaagaagaactgaggtgaacgatttggaagaaggattatttttactgttgatcgtcttaacgacagtcatcatcctacgtaaaaagaaaaattgattatttcagcgcattctcatcttccatattgcctaacgctccagcagggatttattcccttttatcgaagagtatggatagtgaattaatccatgaaatgggggaagaggaggagctgaaaacggatgaagaattggctgaaaatcttgccgctgcttctcattattctagcgggctgtaatgacaaggatgaggcaggggctaaacaagttgttcaaaaggaaagtgatttagaggttagtgacacgtttacatcgggatcgtatacgatgattggagaagaaggaagacttggctttatttatgatgaagcggcaacatttaaagtaggtcagccaaacaagtatatgtggcatttttggggacctgatgatgaactagatggaagatttaaagtgatcggaaccaatcaggatacaaatgaagaagtggttgtttttgaaacaaatgaagtagccggtccgcataatggagcggatggtcataccccgtcttccatgcagcttccttcaagcgggacttgggagctcgatgcttatgtcggcggtgaattatttggaacggtcgttgtggaggttaagtaagtgtatgtagatcaacaatcacaaaaagagttgctaaagaacaaagacattgacgaacaaaaagaagcgctcgcgcacattctttcgttacaaccagcggttacgaaagcgctggaggtactcagcgatgaatttgatcatgcctatattggcgcagggtgtatcgttcaaaccgtctggaatcatatgacgaatcgccctttgcattacggaattcatgatcttgatgtggtgtattttgatgagcaggatgtaagcttagagaaagaagtagaaatagaagaacggctacaaaccctgctttctgataccccttttaaaatcgatgcaaaaaacgaagcgcgtgttcatctctggtatgaggaaaagtttggaaagcggatcgcaccttattcctcattagaagcagcgatcaacagctggccaacaacggccacgtcgatcggtgtgaaagtcgatcaaaagggagcgtttaaaatctatgcgccatatggattacatgatttgtttggattgatcatccgtccgaacaagctcttgatttcccgtgatgtgtatgaagcgaaagtggccaaatggtcagtgcggtggccggagcttgaggtcatctcgtgggatgaaagatgacgaaatgaaaaccgctcctcttaaggatttggttgtacataagttttgcgaggatttaaaagtttaaaagtaagtgaggttaggaatgaaagccaaaacgtttttacacatactcggatgggtgattcttggatcatggctcatccattttctagcgttctatttaattgattcagaaagaaagatctatagtattgaaagtataatagagggcgttgtgtttatagttctcgtagtgcctgtctattttagcggtgttacattgtattacaaattttttgatggaaaggcataggaagtaaagttggctgctgatgagaagaattaggatacaacgggcgctttttcttaagcggccaactgtctctctcctattgatgggtggcggtgtctctcatggcggagaggaaataccttattcgaattggtgaacctagcaggaattccgggaagtgatcttcaccgggatctttttgtatacaaaaagatcccggtgattgacacgaaagttaaatgaaaaagccgttagtttaaaggagagtgaatcacatcgcaccattaagattaaagatgtcgaatttagatctaagaaaaattttgccggtaagttctttgaaattccctatgttgctgggaattgacgggctaagtcgttcaggtaaaacgacctttgtcaccaaactggagcgttattttaaaacgttgggatatcgttcggttacgtttcatatcgatgattacatagaaccgcgcaatagacgctatgatacggggcatgcagaatggtttgaatactactttttgcagtgggatacagcgaagctaaaggaagacctatttggaaaagtgaaagagggagtaaaacttgatcaaggatctcctaacggtgaaagcccagttgcagatgtagtgatcattgaaggtgttttccttcaaagaaaagaatggcgcgaagtttttgatcgaatgatttatttagattgtgcgaaagaggtgcgatttcatcgagaaagcacagagacacagaaaaagataaagaaatttgaagaccgttactggaaggcagaggagcattacttggagaatgttcggccggtagaaaaggcggatgttgtaattgaatcgtgaatctcttttgttgaggtctgttaagtagcggaggttattggagggtaggatcgtatgacgatcgcatatgttcaatggggtgcacagaaagtgaagttaagttggaacggccaaaccgctccagatggaattgtgacaagcgctcatggattctgtttcgatagaaatcaacttctactcgtgaatttgaagcaaagaggttgggactttccaggagggcatattgaaaaaggagaatcacctgaggattgtttggcgcgtgaagcattggaagaaggatatgtgaaaggcgtaagtcaattcatcggttctttaacggtcgatcatagcgaaaatccgaactggaacgaacagagcgcttatcccaaagtggggtatcaacttttctatcgaatggaaattagagaggtactatcgttcaaggcagaacatgaatcaattgatcgcatgtttatcgacccgtatcaagtaggagcctactacaaggggtggaatgaggtgtaccaggcaattttagaagctgcactaaaattggaggagaagaagtgaagaaaagatggtggctctcgttcattctggcaaccgttcttctttcgagctgctcagctaatgaaaacaaggtggccgaaaaagggtcatttagggtttgggatcatcaattcaaatacgaataaacctttgtattttttgtatgctccgggtgtgaatttagaaccccaaaatcacagtggagaatctactgttgaacgttcgatgacgacttgggattatgcgtttaaagacaaaaaagtaacgctaccattagatgaagaaaaagtactagcggcgtatcggagtacaacttccaacgagatgaggatggttgatttgagtgatccgaatgacgtgaaaaagatgattcaggaagatagcgaagttttactcctcaagatcctcatcactgaacatatagatgctcttcattaatgattggggtggtttattggccaaattctcattatattggccaaaaccgaaatatattggccaaaattagaatatattagccaaatctcatttttattggccaaaatgaaaagctgccgggatggtcttacccctgtcaagtagacagtataaaaaaactacgctgccaacgcgtgtcgatattcaatcggcgcgcgttgctttaatttcttctggaaacgtctgtagttatagtggtagatgtaatcctcgattgcttgtctgatctcgttttctgttttacactgattgatgtacaacttttctgttttgagatgcgaaaagaaggactcaatgcaggcattatccaggcagtttcctttgcgagagtggctgcccttaacgccgtattcttctattcgtgtgttgtatgccttagacgtatactgaaagccttgatccgaatggagaacggctttcgttacgtcttttttctttgtccattgggcaactgtatctagtacaagcgctaaatcgttgcgtttagaaagcttccagcttacgatctcattgttgaataaatcttgaatcacggataagtaataaaatcgtttaccatctgatacataagtaatgtccgtcaccattttctgattcgttccatttgctttaaagtttcgttttagcctatttggattgatcacagacggagtgtatccatgccttttcctctttttacgaatcaccgattgaatgcccatctcgctcatcaatcgatacacctttttgtggttgatgtggtaaccactttctttcaataaacgcgtcatagtagggtaacctgtttccggatgaagaaaatgaatccccatcatatgcatttggatgtcatgatcttgattggccctttcttcgcgctttactttactagatctccatttgtaatagcttgatggttggagggaagcaatctctaacaaccaggtaacaggagctttattccttaaatcttccacggtttcatactttattttttgcgtgattttccctccttttcgagattttgatactgcttttttaagtaatccacctgcgctttcaggtaatctctctcttcttcaattgttttaaagtttgtgcgtggcctaccatgcataggattttcctcactgcgacttcgaatatcaaacggctcaccgtttttccacttcctcacccagactttcagctgtgtactattttttattcctaattcttccgctaaagcattgtaactttgagaaccattaatgtatttcatcacagcgttctgtttaaactcgtctgtatacgtctcaaacctctgcccttttttagccatagaaaaaatcccctccaagcatcattctttcctccaccatatcatggaggtttttttgaatgtctacttaaaagggataatatcaggaatccggccgctttttttagtttcagctcacgcttaagcgaaataaatctgatgtccgtggtagagggacagttgtttgtgaggggggtcaggtacgtacctgaccctctattatgacccctctattacttaccccccttcttacttatcaatcgcgagacctgcgccattgtaaaggggagggaggattttttgcgataggcgaggtatttgcgttcccaggtgtgagcgtattttcctttgaacttccgtaggccctggaagtggtagaagatatggccatgtaggaagatttgagccgcgattcgttcacttaagaaagagaattttgattgacccacatttgcaagtggagccatgccaaggttaaaagactgatagccttctgctttggcccattcaaataatgaaagaaacatgacgtccattgtgccagacggggcgctgtgtatgaagcgcattaaatcgacagaaatggttttgtttccatcgtagactggcataagactagtaaaggcgataatcgtatcattttctttcatgatggcgatctccgacttattcaaataatcaacgtcaaagaatcctaaagaaaaccccttttcattccttccttgtagccattcatcagatacatttttcagtttgttcaatagcgcttcactatgaggcggtgttgcgatttcaaaaagataattttctcgttcaaatttgtttttaactgcgcgcagcgccttcatttttttaccggataaggtgaattgccccaaatcaacgaatgcttcttcaccaagcttaaaaaagccaaaccctttttcgtgtaaaagtggaagcaagtcattgctcacttcatagaagactggcgtaaagccttgaatatctgcaagctgttgaaactcatcaattgcatttgaaaagtcgctttcctcaccaaccggatcaccaagaacgacaagtttatcagatgattgttgaaagctgaggaataccgtacgctttgcattccagaacagcgatttatcatgtaagaatactaaatgcgttaatgtattgccgcgataggttgttaagtgctctagaatgtgaggatcttgcttaggctcggaattctgaattggatttttaggtttaattacggcgtttccaataaggaagaggagtagcgcaatcaataatccaattaatgcactgtaaaacaacgtgtggtaatccgtaatcagatagggcaacacttgtgatggaatcgcgttcgtagaagatggcaagctcatatacccaatgaagacatacatcgacgtaatgaaaagaataacgagagcatcaataatcgttttgctccatgttaaaacatagctttcacgataaaagcgcgttcttgatagatagagaatgaatgcaaccattaataggaaaatggcttcttcataatcaatcccttttgaaaatgtaaatgcagccgcgcagaaaagaacaacgatcgtcagataataagctcgtttcactttgtattcaatgcctctcgataatccgagtaaagcaaagccggctccgacagaaagctggtgtgagaggttaacaagaaacggaatcgagtgcatttcctcaagaatttttagtcggtcaatgattccgggtaaagcagcagataagagcaagattaatcccgatacaaagactaacaaagtaatgaatacatggctaagtctttgcacgagtgcgatcgggagattatcccagtttgcattccacttttcccaatagtctctgatgaacagaatcatcgctagtaagaatgggaagaaaaagtaaccaatccggaataaaatgagcaggaaaagcaccttttcattttgtataccaatcagctgactgccccagatgaaagtgagatcaaatgaaccgagaccgccaggaatcatactaacaatgccaacacatgcagcgatcacaaaaagtgggaaaagttcatgaaatgagatgcttaagtcaagcattgtcgctaatagccagatcgcaagaaacgcaaatgtccattcaaggaatgatacggcaatgagctggagcctcgttttcgttccaaaagagcgcgtccggtagttgttccacaagaacgaaaaaatgagaacgggtaaataaagtccaacgacgatcacaaccaaataaagccagggaatttcctttagtaagaaactatctctgtaactggtcagtgtgattaccgcaagtagagatagaccagttaaataaaagtaggtcatgtttccaatgctctttgatagttcactgtgatcgtcctgctcggtttgataaaaatattttcgaagcatgctgctaacgataccaccagatccaatcaaatttgaaacagcatttacgataaacgattgcttcagaagttgtttgactggaaatgttttttgcaatgatttcaaaatcaaagaatcatataaaaacattgggctaaccgcacccattgtaatgagtaacacgagaaaaatttttcctatattaaattgacttacttcatttaatagaagactcacatgaacgtctgatagaaatgacgtgatttgaatggcagaaagtacaaaaagaaaagctggtaaaattaattttaaatagtgaaataaaatggtgtgtaaaattggtttcatagttcactcctttcatatgattttacaatatttttatgaagatcatgcaaaaaaatgaaaaaagatgataggtagacctttttctttcatacaaaaaaccgctcagaggagtgccctctgaacggttttatttacatctcttcttgcgttgttttctttcttctaaatcggtagaacacaaggtaaagcatcggcaccataatcagtgttagtacagctgagaagaggatacctgaaataatcgtaaccgcaagtggtgtaaagagcgcgtcgccacttacagcaactgggattaaggcaacgattgatgtgatggctgtaagaataattgggcgcaggcgtacacgtccagattcaatgacagcttctttcacatccatgcctttcttaatggcttgttcaataaattcaataagcacaaccgagtttctcacgacaatacctgtgagagacaccattcccatcacaccaaggaagctgatcggtgtttgcgttacgaataggccaagaattgcacctgcgattgcaaggtataccgcaacgagtacaaggaacggtagagatagtgaattaaattgtagcgcgattaacagatacactaagaacagaacgataatgaagaggacggtaatttctgcaaagaaatcattttgtgcttcattttcaccgccaagtgtaatgctgtaatcagcgtcttcaagctggtcacgctgatcttccacaatctcagtgacgtttgcttcataattctcttcgtctttaggaaaagcccgaagcgtaatcgagcgttcgccatcaatgtgagggatcttttgaatttgttcactttcttctgttgtgacaagctcatctaacgaaatcagttcaggaggtccgcctgcagaagcagctggaagctcaaggcttgagagatcaacttcatcttcgcttcctccaagcacgatgttcatgtcgcgttttacgacgccgttatcaaatgcttttagtggaatgccagctgttgccagacggatttgctgactaacctgattcacggtaatgccgttttcttcaagagcatcacggtctggaacgtattcaacagaaggttcaaaatcaccaacgtcatctacgacaaggtccgtttcaagtccttcaatttctttcgttaggttatctcgaagttcaattaatttatcaatttctggtccggagacggtaacggtaacaggtgctcctgctggaggaccctgctgaattgtttccatgaaaatctccgcttctgggtaggcgtttcttaatttatctgtccagtcgtcaatgaggccctgcgtcgtttggttatcacggtcaacgcgagcgacgatttgtccagtattttctccggtactcgttaatgaactattaaagagccctggcgtacctgttccagtaaagacgcttgtttcatatacgccatcatctgttttcaatctttcttcgatttcttgaagcgtatcgtgcgtttcttcaattggcgttccgattggaagtgtaatatcaaccgttacttcttccttatctgctgccgggaagaattcaaatggtgttaagacgactaatccaaaaatggcggttgtaagaactaggccaagaattgaaacaaggatcggttttttagaaaaattcttgagaagcttatcggcgtatacatcagctagtttatttagcggttttcctaataaacctggggcatctgacattggcttcttcgatcgtttgcttaagaagtagcgtaaaatcggtacaaagattagtgctacaagcgttgatgcaataattgttgtaatcagtaccgtaggcaaggcgcgaatgaaggcaccgtttccgcctgacaggaaaatgagcggcaggaatgtaaatacaatcgcaagagaagaggttacgatcgaaacccagatctcttttacgccattgactgctcccatcatacctttgtcaccaagtttgtatcttcgctggatgttatcgtttattacgatggagtcatcgacgataatcccaagtgcgatgattaacccgatcacggaaatctggttaaggtccacatctgcgaacggcagtgggataaaacccataaggacagaaattggaaccgcaagtgccacaacaagggcaccagagccagaaagtccaagggacgttgctacaataacggctagaacagaaattgctagtgataagaacaagccatcaaaaatatcagttacgatcgacgcttgtgagtaataaggttcaagttcaacgttagaagggagaccttctgataattcatccaccttatcacttacacgctcatcaacagtaggaatgtcctcacctgatttaacgtaagccgtgaaggatacggaaggcttcccttcaaatgtaatgatatcttcaagttcttttggacttacttcgactgtcgcgatgtcttttaagtaaaccgcgtcaccatcagggttttttccaacaaacagctcttccatctcgtcaagagagtcataattttctacagaaagctgaacaactttatcgtccatttcctgttttcctaaaggagttgggtagtactcattgttaattgcactttgaacgtctgttacgttcagtccagaatcctttagttcatcttgctttaattcaattaaaatttgttcttcaggcagtcctttgattgttacgcctgaaacgcctgataattcttctacttcatctttccagcggtttaactcttcctgtagggagaagaggttgtcacggttatcgcttgtaagatgataagaaacaatcggcattttcgcggttgattcgttcacatccggttcgaaagcttcttctgggaaagaagtagaggcatcggaaacggcctggcgaacgtcactaaaaacttcttttttactttcgccttctgcgacttcaaccacaatgttcgaaaagccagcagcagaagatgatgtgacctctgcaatcccatcgatcgaactaagtgatgactcgattgggttcgttatcgatcgttcaaccgtatccactgtggcaccaggataaaccgtgctaatcgttccgatattcaccgttgtttctggaatttcacgttgtggaagttgaataaatgtaaacactccaacaatgacaaataataggatgaagataatgaaaagcttggagcgttgtaaaatccatttcagcatagaagagcctcctctgttcgttttcgactggtcggtcaatctgatgtcatttatacctcatatttgttgaaatataaagttttaatgtgtttgactcaatagtcatttttacggagatcggttaataagtcaagaaatgagtgtgcttgaaaatggattttaagcagaaattgtgtctaacgtatgatagagcaaggttcttctaaaaaaatagcaacgtaactcttatcacaggacacactgtgactatcatttcactcatgaagtagtgtattctgttgaaagaagacatcgaggtgaacgatatggataaacgaaaggcaatattagaggcggctgttgaattgatcgcagagaaaggctacacccacacgtcgatgcagcaaattgcggatagcgtcggtgtgtcaaaaggatcgctttatacattttttccatcaaaagaagatttaataatttcaatttatgaacattaccaacagcttgtatttgaacgggcttttgtcgtggggttagatgggaatctgcctccatatgaacggttcgcgaaacagtttcaagttcaatttgaaggtatattagaatataaagcttatatgaaaatgcacatgcggggagagtcagcccaaagtagtgagaagctagaaggaatgggacatcgcatgaggggacgcttgtttagctggttagagcgaaatttaatcgatttatatggagacgaaatcgaaccgtataaatgggatttaatgtggatgacgcaatcaatctacacttcttataccggcttaatgatttcttctgaaaatgaactcgcccctgatcaacttggtaaacacattgtcaggcagattgatattctagcaaaagattatttcgctggaaaaagtaatcctcttctcgatgatgagatgatgcgccccttctctgttggaatggatcgcgaaggagcgtttacctcatttgaaaaaagagaaaacgcatggaaaagtctttatgaaagcattcatcagctcgatcagtcgcactactatcttgaagtgaccgatcgtatttccgaggaatccaggaaatcaaatcctgatgaaattgtgatgagaggcctgtttcagttgttgaaagcggaagaagaactaaaagagaaagcgcaaatattaaaaatgcagctgctatctggatcggaacattagaaagattagctccatttggtttcgggtaactagttaatagagagacgcggtacaccaaaggagagaaacataatgacgaaaacacctacatcaattaatggaagtagtacatttatttcaattgtatcgatagcggcaggctttcttgcggcaattatagcaggaagcttcctttctggggccatcgaacttacaacgatcgaaatctttccgatctttttccctatacttatttgtgccgtcggcattgttctaggaacgattgcttaccgtttatccaaaagaaaactagctgtagcaggaattgttgtaaatgcggttgtgctgttattaccattaacatttattgtagtggaatggtaataggatagagaggaacttttttaggtttctagaccaaactttaaatacttataggggcacccaccaaagcgtcatttggtgggtgcttggttttaattggaaatttaaacggtataatgtgtcgctaggggtcaggctcgtgcctgaccccttgtaacttttataggggagatttcgtctagttaggaaaggtagtatcaatggaaggagaaagattccatgagacttgagaaaatcttgttcattctgttggttaccgctttactaactggctgtggaagtatggaagagaatgaatccaactcatcaagtcagaattcggagcaaacgagtgtagagacagacgcagagaccgatttatctgcacagattgagatgatcgcaaacgatgagaaaatcattgaaatgctgaaggagtcgggcgagatcccggagaatgccagtgctgcagaaattcaagaggtgttagaagagtatttgaagaaaaaagccaaatctacagaagtcgatgataaatcaagtgagaaatatatcgaggatttgaaaaagcaaattcagaaagatcttcaaaaagaaaacgaataatatagctcgatagtaaatacaggaacaaggctcagacgttttcactgagtcttgtttttttgagtttaatgtgttgaagcgttattgcagaaaaacaatagttgtgtcgctttcgcgtacttttgaactatgaccattggttgataattgtcattttactagtaaaatacgtttattttagggttaattgccgaacatcgtgactttcggatcattcaaatttttcagaaaaagagatatagtgaggtcattgtaaagttattgtaaaaaacatttttagggggaatgaggaattgaaggggaaaaacgtattgtcgatggcgatgatcgccgcgttaacgctaagtgccttttcggcgccaagtagcgcagctcaagctgacgcgacaccagtaaaacaagaagtgaagaaagaaacggtacataaggaaggaccatttgatctcgcgattgcgaatgaagagaaattgattgagatgctgaaagagtccgggaaaatctcaaagaatgcttcagctgaggaagcggaacaagcattagatcgctttctaaaaaagaaatcagaatcacttcaagaaaaggattctagcggtgagttagaagatgaaaagcttgaaattgaagctgaagttaaagaaaaattaaagaatggtaacaaggataaagcgaaggggaactatagtaacggcggtaaaaaccttgccccagtcgttgaagaaaaatatgacggagacgttcgctctgataacgtacttgttcttctcgttgaattcccagactttcctcataacagcatccagccagaagaatcggatatgtactatgaggattatgtgaaagaacattatcaagatatgatttttggtgaagacgggtatgaagggccgaatggcgaaaatctcgtatccatgaagcaattctatgaagagcaaagcgatggcgcttatacagtgaatggtgaggttgctggatggtacatggcatctaaaaacgcggctgaatacggtgggaactatcctactgaagacggtagtgacaaggatgcacgtggccttgtgaaggaagctcttactgcagcggctgcagatccggatttaaatctagcagactatgatcaggaagatcgctatgaccttgatggcgacggagacttccgtgagccggacggtttagttgatcacttaatggtcgttcactcggctgttggggaagaagcaggtggaggtcaacttggatcagacgcaatctggtctcaccgctggaatcttggagggattttcccaattgaagggtctccagaacctgaagtagattattggggtgaaggctcaatgtatgcctacgactacacaatcgagcctgctgacggcgctgccggagtatttgcgcacgagtatggtcacgatctaggtctaccggatgagtatgatacgcagtactcaggtgaaggggaagcggttgcttactggtccattatggctagcggtagttgggcaggaaaagtaccaggaactgaaccgactggttttagcgcatggtcgaaggaatttctacaagcttctcaagatggaaactggttgaaatatgatgaagtagatttggaagacattgataaaaaaggtctagaagtttatcttgatcaggcgaatacgaaagggaccaaccttgatgcgcttcgtattaacctgccagataaagaaacggtcattaacgaaccattcagtggagaatatgagtatttcagtggaagcgccaatgatctagacaattcagctgtgatgaatgtcgatctctcaaccgctgcttctgcagagctaacgtttaaaacatggtatgacattgaagaagactgggattatggttccattcaagtgagtgaagacggtgagaattggaatacaattcctggtaacattacaacacaaaccaatccacacgatagtaacccaggtgatggcattacgggcaaatcagacggatggattgatgcttcatttgatttaagtgcttatgctggtaaagatgttcaggtgaaaatcaactactggactgatgctgcggcaattaaccctggtttctatgtggatgatgttcgcgtaacggcggatggcgaagaaattttctttgatgatgcagaaggcgagccgaaagttgagctagatggctttacaaagaataaaggggtaaaagtttcagagcattattatctgctagaatggagaaaccatgaaggtgttgatgaaggactaggtcatattagtcgtggcgacagtctgatgtcatatgatccaggtcttgttgtttggtacgctgataataagtattccgataactggactggtgctcatccaggagaaggcttccttggcgtagttgatgcggatcagcatgaactcttctggagtgacggaactgttgcgtcaacgcgttatcagattcacgatgcggcatttagcctacgtaaagatgacaaaatgttcattgactacactgatctccttggtcgcacaatgactgataagaaaaatcaattcgttaagttctttaacgatgataaaagctacttgaatgaagcgctacctgatgcaggaagaaatgttcctgaatatggtcttcagtttaaagtaactggtgaagcaacagatcgttctgttggacgcgtatcgatttcaaaaaaataagataagcaagaagggaacgctatagaggagcgttcccttttttggtttcatacgcctcactttttgaagaaagtagtaacgtaaggttgaccgggtggtgcaccctatagtttaagatgaagtaaggaggtaaagatgtacaaaataggtgagttcgctacattaacgggtttgagcaaggaaacgcttcgctattatgcagaagtgaatttgttagagcctgcctatatggatccaatcaataagtatcgctattatgatgatggtagttattttctagcgcttttattagggaagcttcggcgctttggattcacaattcaagaaatgaaatctgtgatggaagatgagtcgtttgctcatttagaagatctcttgcgtcttaaaaaagcgaacatcgaaaatgagatcaatgaacttcaacttcaagtaaccgagattgatgagtttcttagatcagggagggatgacgaatgatacagtggcaggaagaaaagatgatcgaagcgccgatcgaaacggtatgggaattatttaaagacgagcatattaaagcggttatgcctaaggttgaagagcatgtattaattgaaaaagaagagcatgaggtaggggcaaagcatcgacaaacgtatcgtgaaggaaaaagattggaaacgtatacggttgaaacgcttgcttatgaagataacgaaacgcttaaagtgaagcgcatatgctttgttttaggaaaagcgtttgaaatcacgcttggctttacgttggaaaagatgggagaaaatcaaacgcaattcatttatgaaggacaaaataaaggcgtgaattttgtaggtagagcgatgctgaagttaagtcgaccgaaggatcaaatgaacgttgtgcaggagtttatggaccgagtggaaagcgaagcaaagaagagggcttagaagtgaagccctctttttctttacttaaaatagttgccaactaactcatctagctgtctaacagttgtttggtcaagtttcggatcatctctgagcgaacaaagaacgctctcgatgagaaactttctggacttcttggaatggagcagctcatcctttacaaaatctaatcgttcaattgcttcactatttgattctgttagatcagcttttaatgaacgaatggtactagcgagatttgattgaaacaactggttaccctctggaaaccagtcgtccatctgctctggcttgtttagttgttgatctgcgattgaagcatcttccacgaccgtaaccatccgatccacgctgtattccacaactggataaatatctgcacttgctccattcgcgatcgaataatactttacattatggtgaagtatccccaaaaacatgatcgccccatccaataagtacggttgtttttcttcgccaaatagctcaagaaaccggttgtaaacccatcgaagcattcgtttttgaccttctcgaaggaagtgttttaagtcttcatcgtttgaaacaaacacttcctcaaacagcgtaatgagcttgttttttttatttgtattcatttgcagttcgatttgtttcttgaaaatcaaaaggtccgatgggtcctggccgataagcagttcatctcgttgttgctccatcgattcataaagtgctttaaacagagcgattaacagttcgtttttagaagaaaagtagttgtaaaacgttccttttgaaatgccgctatactctaaaatgtcttgtatggaagtagactgaaagcctctttctatgaaaagctgatgcgccatcttaataacatgctgtttgcgatcgttcatcgtatcaccttttacttctttatagttatgagtccttatcattactttttgtactgccggtataaacctgatcatacctcacttttatcattgaaacaaatccttatgaattgggaataaataatgattgcaaaagttgaactcatggtatatgatatgagagatttgaaccgatggtataaataattgaactgaaggtatatggaggtatgatgatgagtcaatcaggaaaagagacgcctcgtccaaagtacggtattcttgcgattttgattgttggagcgtttatcgcgtttcttaataatacactgcttaatattgcactaccgtcgattatggcggatttacaaattgaaaccgcaacggttcagtggcttacgacaggatttatgcttgtgaacggaatcatgattccagctacggcctttttaattgaaaaatattcggtgcgccgcctctttcttgtggcgatcgggctatttacgcttggtaccgtgattgccggaatggctcagattttcccagtcctacttggcgggagaatgttacaggcttcaggctcggctattatgatgccgctcttaatgaacgtgatgctcattagctttccgattgaaaaaaggggagcggcgatgggcgttttcggtctcattctaatggcagcgccagcgattggtccaacgctatctgggtggattatcgaacattatgattggagaatgctattccactttgttacaccgattgccatttcaatcttcttgcttgggttcttcttattaaaagataagaaagaaaaggtgaacattcgacttgatttgttttcacttattttatcaagcgcggggtttggtggcattctttacggctttagttctgcggggaataaagggtgggatagtccgcaagtttatttaacgatcgggattggggttatctcactgacaaccttcattattcgacagtcgaagcaagagcgacctatgctaaactttacaatctttaaatatccaatgttcgctctttcttcttccattacgatggttgtgaacatggcgatgttttcagggatgctgttgcttccaatttacgtccaaacgattcgaggcatttcaccgcttgatgccggtttaatgatgctaccgggagcactcgtgatggccttcatgtctccgattacgggtcgtttgtttgacaaaattggtgggcgaatcctagctacaactggtcttgcgattacggttgtcacgacgtacctgttcagtacactgtcgatggagacaacgtataactacattatgattcttcatgctgtacggatgttcgggatgtcgatggtgatgatgcctgtttcaacgaacgggttaaatcaactgccggctcgtttctatccgcacggtactgcaatgaacaatacgttaaaccaggtagcaggagcgattggcacagcccttctcgtgacgattatgtccaaccgaacagaatctgttgcggctgatcttgcgaaagaagctgcggctggaaacgcgggggttgacccagctacgcttcaacagcagattgccatgcaagcgatgcttgaaggcattaacttcgctttctttatcgctacatttatcgcaggtttagcgtttgtgcttgctttcttcattaagcgcgcgggacgtgaaaaagaagtgaagcagccgattgtgccagagtcgaagcctgttgatcttgtaacaaatgcatagcaagactaaaaaggatgaagccgaactggtttcatcctttttaatttattctttttcaacacattaatttatatcctgtgtaccatagccagttaaagtgaaatcgacatcaatcgttactggcaattgagcaaaaatacgttcccaatctttatgatgcttttgccaataggcgggctgtttaatgcttgtccacgtaccaaattcaaggtaatcgagcttttgttcctgggcgatggagatgacgtgctccatctcttctttgacgactttttccccctgtttttttagctcatcttcccagcctttttgaaaaacgtctcgcttgatttcccagtcttctgcaagtctcagagagctttttacttttaactgaatggtaagctgtccatcttttaacacgggttcgatggacgtgcttgctttcgtaatctcaagcacagcttgatccgcctcggaatttttctctttaatcgctactaatccaccgctcacttgattcgtaatccattttaatccagcaatttcttcaggagtgagccaaccaacgatatgctcggatttattcgaaataataccagcaccaagcagtcgaatacgtcctttattgataccaacttctgggataacgaagcttgccccttcggtaattttttttgaaacttctccaaatttaagcgtatcttgaacatataaacttcgatcatggttttgtgtgagctcttttatctgaacggctggaaacatttcttttgttggttcaacagcaaggatatccgcagaagattcctttgtgataaaaatagccactgttcttctgaattcatgatctcgtaggaagaagctaattaattgctttaaaggctcttcttttaaaagcctttccgtaagaaccatggattttaagtgggtatagtttggcggacgatctgtctcaagggagttttcacggataatttgaaaaaagttgctgccgtttaatgtgatgttctgataaggagttcctcctgagcttccagtctgtgtgccttcaatattgtttggtacaacgtactggttagtcatggaaaatacgtcgtcattcgattcgttgtaatctagtcctattcccatgatcatccctagatcctcgatttcattgctatcccagcatgaagtaaggaaaagaagttgtagagaaatgaaaataagtaagcccttcttcatttcatcgtcccctttctgaaggaaaagaggaataacaaaaggggaattgcgattaaagctgcataagataaatagtttaaataggttccatatgaaaacagctctgtaatgcccgatggtagtagtgagagcattaggatgagcaaaccgatgatcgcgttcatcaaaagtgtttttttacagttaacggttttacaaacaccaagcatcgcagaataataatatgcggtcagggtcgtgaagattgtgataatccatccaaataaaaagagaagctcaaatctttcaaagaaaaacccctggaattcaattgcttttgccatttcgatcgttgggaaagtaatcacctttagctcttcaatactaagaacaccaatatttaggatgaagaacagcacgtaaataaagcatacacttccgatgctgatgcctagaataaagacgactggtttccagcgggtaaggcgatgctctcctgatagaaccataagaagctcataccctacgaacgagaaaaaggtggaattgactccttttaataggtcaattacatcaatatacataattggacgtaaatgagtagtctctatattcttgatgctcagtaaggttaaaagaaaaaacattagtaagatgataggaaaatacagttgcaaaaaaagcaggatgttaggaagaccggttgacacgagatacatacaggagagtacaagaacaagtaagacaacgaatttgggtgttttatcaagtaagtagtaattcacaatttcagccattgtacgaatgatataggcagaaatcgcaatcgtgtagcaaacgaaaatcagattgagcagctttccaatccattttcctactaattctggcgcgatatcaaaaacggttttcaacgggtatttcttcattaacagaaagatcaaaagcgcattaatgaatgcaataatcgcgccgagaatcacacttatccacatgtttggctgtccaacaatcgtagctgtttcacgtggtaacgtgacgatgccaacaccaatgatggttgaaataaaaaagataatgatgggaagagagtgctggttggtttgcaattaaatccccgtcctttttcccacacggtaatagagccgtataaaggagtctttccatcgtttgaaatgaatgggcgcaaatggctccatataagggctcgaaaagcttctaagtttaatgagatgggtcgtgactataaagatggcgattagcataccatagacgccaagcattgctgcagaaaataagataaaaaatctaatcgttctgagcgcgagacttagctggtaattcggtattgcaaaagaacagatggcagtaaatgaaatcaccataaccatcataggactgacaattcctgaacttacggctgtttcgccgattacaatggccccgacgatgcttactgttgaaccaattggtttggggagtcgcaccccagcctcacgtagaatttcaatggtaagttccataataaaggcctcaataacggaaggaaacggaacgccttccctagtctttgagagagaaaccgcaagacttgtaggaataagtccatggtgaaacgaaatgagtgaaatataagctgcaggcaagagaacagagatcagtgctgtgaaatagctcaacagccgaatgagagatgctggaatccatttaaagtaatagtcgtcaggcgtttgaagaagcatgttaagcgttgttggtgcaattaataccgttggtgagccatctgtcattagagcgacgcgcccctcaagtagcgcattcgctactttcgttggatgctgagtcgaggctagttcagggaaaacagagagaggattgcgttcaatcagctgctcgagcactcctgcatctgtaatataatctacctcaatttgattgactcgatctcttacttcgttaattaatttctcactcgcttttccttgtaagtaagtgattgaaatcgatgttaccacatctttcccaacaaaatattgctcaaacaaaagatcgctcgtttttaagtgagcacgcaataatgctttattatcctggaggcattcgataaaaccatctcgtggcccactgatcgttggttcattcaccggttcatccggtgatctcttgacagaatacgtcgtttttatagagtaaacgtgatcatcggtcgtttcccgtgcgataagcaccgtacatccatccatcagatgtcttgaaatggtgctgtgatcttcaatgttattaacagctgccattggaatgagatctggaatatcggttgggctaatcttcgtgtcttcacttgagatcgttagtagcggactaaggatggttttttgaatgaccatccgatcggaaatgtcatcgagatacaaaagtgtaagcgtgagaccgtcgagttgaatggttttctgttttaggtcttcactgttatgaaactcctgcttaatttgttcttctaataatgtagaagaacgtacgaatcgtcttcttttcatatcatcactccgaaaatgatctctctttatcatttgctgaaatcataaaactatccaaatgctgtcctttctttcaaaaccctgttaggatatatgaccaatttgttattttcaatttttaaacatggtacgattttgcatattatacagtccagaaagaaggggattccgtgaaacgccttgttgtaattggaaacggacttgctggcaatcagtttcttgaacgcttgcttttgatgaagtcttcacgttttgaaataacaattattggaaaagaatctgcttataagcgatatttactttcgctgattcttcaacaagatgttggtgttgaaaaagcagaattagaagatgaagattggtacaaacagcgaggaattcgactcattgagaatgaaacagcggttatgattgatccactaggtcgtcatgtgaaaacagataggggacggaaaattgcatatgacacgcttattcttgcgacaggtgctaatccgcacgttctttcagtgaaaggagcaggaaagaacggtgttatgacgtttcgttctatggacgattgcaaagccttaatggatgcatcgaaacgttatcgaaaagcagctgtggttggtgctggtgttctaggtttagaaacagcgatgggccttgttaaacaagggatggatacgacggttgttcatcatcaaccaaatgtgatgaatcgacagcttgaccgacttgcatctgaaatgctacaagaagatttagaaaaattaggcgtaaaatttgctttatgtaaacggacaaaagaaattaacggtgaatcttgtgcacaatcgctcactttttctgatggaagttcgcttgaagcagatctcgttcttatggctgttggagtaaagtcgaatgtggagttagcgaaaaagagtgggttggaggttcatcgaggcatccttgtagatgactatttgcaaacaagtgatccatctatttatgcgataggtgaatgtgcagagcatcggggcgttacgtacggtgttattgatccgattcttgatcaagcggaacatttagcaggtacgattgcagggtgtccgaaacaataccatggttccataccttcaacaaccttaaatatttcaggtatcagcttgttctcggcaggtcaggtgcttgaaacggaggatacgagaacgtaccaatggattgatccgattcgtcacatctacaaaaagattgttaccttacatggtcatgtaatcggggcgattctttacggagatacttcagaagctgtcattttagcgaaactcgtcagtcgtttagcgccggtttctgaaattccttctaatcaactttttcctgaagaaaggaaaagaaaaaccaatttaacgcttgttccgagaagtgatcaagtcagtagaacagtgcaaagctagtgaaggtgaatagtaggttttaggaggatcgatacgatgccggttcaagctgtcaaaatcaatgttggaagaacacgtgatcacgttcctggttttggtcgtgcaattgatttactccagctatcaattgcgattttttgtctgccagatggcacgtttcgagcgcttcataaccgttgtcctaagggtggggacattgtcaatggagaaatgtctgggcgatttatcacgtgcctcgaccatcagtgttgtattgatctctttacagggagtcttcaatcaactcttaacagcaaggtcgaaacgtttccggttgaagttgaggatgggtttatttatgtcacgctagaataaagtttagttgaacaaatcgacacggtgctgtaccctctatttaagatgaggcttaaggagatggtagagggatgggacttatggataaaaggattgcagtaacgggtgggcgaaagggagaagaaatccgcacccttatcgaaaaacagggtggaaaagcgttcattcgcccagcgcagggaaccgtctttacaaatgaagcgcatgttgttcaatcaatacaagaaatcattgaaaaccctccgcaattattgatctttacgacaggtatgggcgaaaagagaatggctgagcttgcggaagcaaacggtctagggaaaccttatgaacagctacttcgaacagttccgattgccgttcgaggtacgaaaacccttcagcattttaagcaaaaaggtattacaccaggaacagtagcggatcgtgggacgatgaatcaactcgagcattcgctcgcgatcgagaatcagtccattgctctccaaatgcatggggagaatgtaccaacgtttattaaaacgcttgagcaagcaaacaataacgttcgaacgatttatccgtacgagcacacgcctccagaagaagcggtggtcgaacaattggttggggagatggaaagtgggttgcttgatgcggtggcatttacgagtgccatccaggtacggtacttttttgactatgttgaaaataagaaaaagaaaagcgctatcttgtctcttttaaatgatgagattcttcctgtagcagttggggaagtaacggaagaacacctgagagagcgcggagttgagcgagtcttaacaccaaccacaccacgtatgggcgcgatggtgatggcaatgtcaaagtattatcaggaataataaataaaacaaaaagccgtcttccattttaaggatgacggctttttgtatggatttaatttgtttgatcggcgagcttcacgaggacgtgagccatatgctgacgctcttcctcgtttgctgcattccatagctcatttaaaactttttcttcccggttacgtggctcttcatgcttcgctagatagtctgcaacgcgcttagcgccttttgataatccttcttcaccaagaccgagcttttcgcctttatgaacctgatcaccgaggtagtctttgaaggttttgaagttctgcataatatcatctttcttatcctcactcatatgtgctgctgcttgttttggatctttctctgccattttcattcatctcctttagttatgttcattcgcttgctttttcgaaattatgcttttttccaataagccgattctttgctggatcgaaggggaggaaaggtttctccgctttgaaggctaatgtgcttctcatcttctgtaggattactggacttgtttccgttcgttaaaccatcaaactcatactttccattctccggtgccttttcacctgttttataacgatctgccatttcactcatctccttttttgtttagtacatagggtatgtaaccggaaatggaaggcattaaacccaataaatggtttgttagcacattgttaaagattcaggtaatccccttcattaatctcataccgttcaatcgctccttcgggcaattcgagagttgcattagcgcctttgacgggagggataaacctccacggcttaatgttatgaaggactttaacgacctcgttttgttcacttagaaagacaacatcgatcgaaaagaacataaaacacatatggatggagttacacggtgtgatcaaaaggccttccttgtgaaggggacgtattcggaacattagcccttttagtcgttttccaaacgtattagctttgctgatcgtaagtgggagtgttcgatatagaatactcttgttggttgtgatcatgacaattctcctaatgaatgacgtttcttatactataaatcaagcgatttttaatctcaatagtgaatatatacctaaataatttgtaaaaaaaaagaaaaaagatcaaaaaagaactttacaaattctctataacgaattattatgaagttaaggttgttctataaaaagaacaaaataatttaattcgaacactatactgaacaaagcgtattagtttgaaaggagctggcgcaaagatctcagtaccattaacaatcagctgatgaaccggtagttatgatttctttcatacattgaaaaacaatatcctaagggggaaaaatgatgttgaaaaaaatggagcagtttgtaagagaagaagaaggacaaggtatggcggaatatgggttgattttagcgggtgtagctgttgtggcagcagcgatatttgtgacgcttggtggaaagattaactctctaattcaatctgttatagataaattataagaataaaaaataaaaccctggccccacttacccaagtggggccaaatttaaaaacaaagagggactgcgatggtatacagtatcctaggtatcgttttacttatttcatttataacggacgtgcgcaatcgacgcattttaaatattgttacgtttcctgcgatgggtgttggcttagtttattacacgatgacactcggtttgaaaggttttctatttagcggggctggacttcttgttgggttcacgcttcttctcattccttatctattagggggaatgggggctggtgatgtgaaattacttgcggcgattggggctttaactggcacttctttcgttcttcattcatttttttatacggctcttatcggaggcattatcggtctttttcttattttaaaaagaatgtcattatggaagtatgtgacatcaccaacttatgcggtgtatgcccttatgaatatgaaggggcttacgattaacaaagaaagcaagctcacttatccgtacggtgtggcgattacgtttggaacgctctgcgctgcttttttaggaggggtggtatgagatcagaaaaagggcagtcgatcgttgaatttgcgcttgttctccctatcctagttatgctgttattcggcattattgattttggtcgtattttccacacttacctggcgattgaccatgcaagcagagaagctgcgagaacagcgagcattggagagaatgatgccactattgtttcaacggcagtttcaagtgcatcaagcattcacctgactgctggtcaggttgcggtctcaccaggcggaacaaaatcttctggaagcgacgtgacggtaaccattacgtatccgatcagctttctcacgccagtcgtttcaaatttaactggaccgatcacgctatccagttcaactgtaatgaggatggaatgatgaagaaattatgcattctttttatgaacgaaaaaggcaacgtagccgtcatgctagcgcttagtttaactgtcctacttggtgtgacagcaatggtcgtcgatgttggaagactttatcatgaaaaacgaatgctacaaaatgcgatggatgcagcagcgctttccggggctcagggattattaacgagtgaggtaagtgctacttcgattgcaaaagaccttgcgagcaaaaacgcgttccccgtttcaagtggcgatcttaccatcacaagtaagtcgatcaaagtatcacgagcatcgacagtaccgatgacctttgcccgtgtttttgggatccaagaagcttcagtccaggcatccgcaaaggcaaaaataggattgcttaaatcagctaagcgcgtcacaccgattgcgattgagtatacggcgatcccaaacgaaacagagctaaagtgtgagaataccggcaaacatcacgggaactgtggctaccttgatatagagagtaatggcgcgagcgggctagctgaaaatattatcaatgggacagaaattgaggtaggtacgtctgttcaaacagagcccggacaaaagtggggacctgttaagggtgcaatccaaacgttaatcaatcaggatgcaggaaaatcaaaatgtcagcaagtatcgactgcggattattcgtgcgcacgtgtcatcattatcccgctcattgattcatgggatggcgcaaatggtaaatcatctgtcaaagtcgttggcttagccgcttattggattaatcggttagatgaacctaaacgaatcgttggcgaatttaaagatatcgtaacgagtggggaaattggaagtacaggtccagggaacttatacggtgtcaagctggtggaataggtagatgagaagtgagggatgaggaatgaaaacaaagcgaatatggatgtggtccgttatttttggagcattcgcgacagtgattgtgtatgttgcgctctttacgaacttaacaacagatgcagaaacagaggttaagaaggtggaagagcctgaggttgcagcagagacaacgattccaaaacgagaaatatcaaatggaatcgtcgaagtgagcgaaggaaaacgcgcaatttcgatcgatgtagaattagctccaggcgtttcaggatacattgaaccaaactcgtttgtcgatgtgatcgcttatgaaacgatgattgatgaggagaagaaagaattcaagtcagccgtcatgatgctgcaaaaggtgaaagtgttaagttcaggaaaatcacctgacagcacggaagaagcgctccattatgtcacggttacgcttgaagtaacaccagaggaaggtgtgagcttaagtcttgcggctaaggataaagatgggttttacctaatgctgcgtaatagtgaagatgatggaacggtgaaagaaggattgaaagaaacacgtcaggtttacaaggagacggaatgatgacggacttaaactggtatttttattcagatacgaatgcccaagcgagcgaattggaagaacttctattgaagaaaaatcataagctaaaaagttttcaacttttagaagatctctttcaccagcttgagtattcaactcatgcgattctttttcttaaagcttacacaacttacaacgtgtatgatctttgtcaggaaatatcgatgaaattcccttccgtttatccaattatcctcgttccagaaaatatggaaaacacgaaaaaagcgatgcgcgttggtgcatcaaatctgctcacttattctgctgatacagatgaaataaatgatgttatcctccaggcgcaaacctatatgaagcaaagagctagcaagggggatggtgcgacgcatttgcaaaaacaaaatagtcgcgttatggcagtctgtggttcaaaaggaggggtagggaaaacatcgcttgcggtcaatctcgccaatgcatttataaaaagtggaaaaaacgtcgttattctggatgcgaattttcaatttggcgatgtcgcaatgtatttagacttaaagccgaatcgcacgatttatgattgggtgaaagaagcggttgaacgaggtcgatatgggattgaaagctatgtatctcaccactcgagcggaatcgctattctcccaccgcctcctcgacctgagttctttgaaattatgacggaagaacatgtggcgctggcggtagctgaacttcgtaaaagctatgacgtaatcctgattgatacgccaacatctctttcggaaattcatcttaaaagtcttgatcttgctgatgaccttcttttagtgacaacaagtgatctgcctgtgttaagaaacacgaagctttacgttgatatgcttgaatctctccatttcactgaaaaggttcatgttgttttaaataaagattcaaagcatcgtgccattgaagtgaagcggttggaagggattctccaaaaccctgtttttgctaagataccggacgtgagcaagcaaatgacaacatcaattaatgaaggacttccacttgtgttaagaaatgggcgtcattctttttcaaaaagtatgcttcatttatcccatctgattttgccaccgccagaagaaacagagaaaaaaacaaaaagatttgcactgagtcgatgaaggaggagttctattgtcgctttttaaacgatacgtcgaagaagaggcattgcaagtggaagaacagagggaagcaacaatcgttaagtcagtggagtacaagcagttagaaacaaaattacaaacggttttgttagaagaacttaaaaagcatcagtttcaaagagaagaagagtcgctgaaaattcgagagtggggaaaagattttctagataaggaagcagagcgactaacgtttgaagaaaaaaaacagatgcttgaatcggttgagtatgagctacttggatatggtccgataacgcctcttctcgaagatgatacggtttctgaggtaatggttaacggggcgcaagccatttattatgagcagtacggaaaattgaaaagaagccacctttcttttcaagatgatgagcatttaagccgtgtgatcgaacgtattgttgccccactaggaagaagaatcgatgagagttccccaatggtcgacgcgcgcctgccggatggctcgcgtgtgaatgctgtcatccctccactatcattaaagggaccctcacttacgatacggaaattttcaagcattcctctacaaatgaacgatttagttcattacgagacagtaagtgaagagatggccgagtttctagaaatctgtgtaaaagcgagattgaatatttttattagcggaggaacaggatcggggaaaacgtcatcgcttaatgttctctcttcttttattccaaatgatgaacggattgttacgatagaagatgcggctgaattaaatttatctcaagagcatattgtatcgctagaatcacgcccacctaacatcgaaggaaagggtgagattacgatacgtgaactcgttcgtaacgcgcttcgaatgcgaccggatcgtattgttgtgggagaggtacgtggagctgaagcgctcgatatgcttcaagcaatgaatacagggcatgatgggagtcttagtacaggacacgcgaattcaccgagagacatgctttctcgtctggaaacgatggtcctaatggcggggtttgacttaccactccgagcgattcgagagcaaatcgcgaatgcgcttgacttgattgtgcagcaggcgagaatgaaggatggatcaaggaaaatcacaagaattacggaagtactcgggatggaagagaatattatcgtcctgcaagatttgtttgtttacaaagaaactgggcgtgacgcagatgggaaagtagaaggacattttgaaacaacgggtgttcgaccacacgtttcagagctccttgaacaaaatggctacacgattccatcatcctggtttaaagaggtgtggtaagatgaacgagcctctcatgatcttcctgctttttgttagctttacggtatttttctattttttatccacaagattgatgcgaaaaaaacatacgaacaaacgaatcaaggaatttatcccccatgcgatcaccgtttcagaagtggaagaaaagcaaaagaagcaaacgctgaagcaaatgatcggttcgtttgctaaagtttttgctgggatgcggtttagtcaaaaaacgcaggggtacctcgttcaatcgggaagtttattaaaaccagaggagttttttgtgattcgtctcctcagcgcactaacgtgtacgggattgttatatggaataggcttaccgtggtatggtcttttaccgacgcttctcatcggatttatcattccagcaatctatatgaaaacgaaagctcaaaagcggattaaacttctgtcctatcaactagtggaggcgcttggaacgatgtctaattcgatgagagccggatttagcttcgtgcaaacgatgcagctaattggaaaagaaatgcctgatccgctcggacccgaatttgatcgtgctgttcgcgaaattggaatgggcgttccgatggaggatgtgtttcaacgtttgttagaacgcttaccgaataaagagcttgaagttgtcattcaggccattctcgcacagcgaaagagcggtgggaatctcgcgcagcttatggatacgatggaagatacgattcgcggaaggatacggatccttgaagagcttaaaacgctaacagctcaagggaagctttcttcatggattattacggcccttccagttgtaatgggaatctatctctatttcgtaagtccagactatcttgagccaatgctgacgaacccgctaggattgtttctattgggcgctggagtgatttcacttttaattggttggttttttattcaaagaattgtacggattgaggtgtagcagatgatttccgtcttatttatgatttgtgcattcgtcttttttatcttcctaagcgcagccgttcttaaaacggtttttcgaaaagaacttgctcttgaaacgagggttgaacattatttcggacagaatgaaacgctcgagcgtaaaacaaaaaaaagagaaagcgggttatcacacccgctgtttcgcaaatattgggggatagggattgagcaggtgaacaaaacatttgcaagaaagaatcaaaagaggttgacgattcttctccatgaagctgggtttggaaggcgatcggcagttgaattccgcttaattcaacttcttctcagcattggtggaggttttgttactttcttgctgattacacctgttacggatggcaatgcatctacaagttttattttagctctcgggatcgctttcttattttatcgctatcctttgttttatttagctaagaaaaaaacacagcgagtgaaagtcatcaataaagaaatgtcggatttttttgatatggttagcctgcttcttgaagcgggtgtcggtcttgaaggagcgatcgcaaacgtatgtgcacgaaaacctggaccgcttgcagatgagttcaatcaagccttggatgaaatgaagcgcgggaaagcaaggcgagaagccttttacactttgaaaaaacgagttccgtctgatcattttcaaagtgtgatgatgtcaattattcaagcagatcatcttgggatcgggatgtcaaaagtcattaaaaacattacgacgcgcatccgggagcaaagacgagagctcgctcgggagcaagcgatgaaagcacctgtcaaaatgctgattccaatggtggtctttgtttttcctccactatttatcattattattggaccgatgatggtaaagatcattgtagatggatttggttaatgacggattggaaagacacttctcaattggagtgtctttttaattggaaaatagggggaggaggccagtctataagtggtaagatgaagaaaagaaacttttggaggttacaacatgcaacaaataaaacaaatcggtgatcgtttttactaccaaacaccagtatccgaaacagaccgaccgattctaggtatggtagttggggatgaaaagtcgttaatgattgacgcaggaaattcagaagcccatgcacgttattttctagaggaactttcacatcgtgggcttaaaagacctgatatgctggcacttactcactggcattgggatcatatatttgggttatctgcgctaagagatacggtttcgatttcttcttttcaaacgaaagaagaaatggctaagcttctttctttatcatggtctgatgcagatcttgatcagcgtgtagaagaaggaacggaaatcgaattttgtgcaaccgccatcaaaaaggaattcgtggatcaccgtgatataacgattacgcttccgaatgtaacctttgaaggaaagctagaaattgatttaggtggcgtgacgtgtatacttcaacatgttggcggagaccatgcggctgactcggtcgttgtttacattaaagaagaaaaaattctatttttaggtgattgcttttatcctgatattttttctagtaaaaccaactacacggtgaggacgacgaaccgactgcttgtcgatcttgaaagctttgacgcaaaatgggtgattttatcacacggagaggcgattgccattgaagagtttaagaaagaagtaaagcttttgcgaacggtttcttcccttacggatgtatggagcggggatgaacaaaagatgaaagtggctctcaagcaaatcgttggaagagagcttaacgaagaggagcttgaagtgattcaagaattcgcaaacgggtatcgtctctaacagatttagtggaaatacacgatggaagtgagggaatataatggcaatcgttcatgttgaaaacgcgtattatcagcgacagaatcaaatgattttatctgacatctcttttacaattgaacaaggacagcaccaggcgatcatcggattaaatggctcaggaaaaacgacggtacttcagttaatttacggagggatctggccgctgcttcggtattccccggttatagaagtgtttggtcaacgacttggaaaaaccgatttaaatgaactgagaagatcgattggatgggtaagcagtgcttttacagaacgaatttcacccatgcaagaggtaacagaagttgtgatgagtgggaaatttgcttccgcgggtctttatgagcatgtgacagaagaagataaagagcaggcagaggagcttatgaaagagtgggggctacagcatttgcatcataagccgtttcaggtctgctcacagggagaaaagcaaaaaatactgattgcgcgagccttaatggcttcaccaaagcttcttattctcgatgaaccgtgtacgggtcttgatttgtattcacgtgaaaagctcttagctcaagtagagcgacttgcaaaacaggagaatagtccaacaatgatctacattacacaccatattgaagagattgctcctgccttcactcatgcgatgttaatggaaaatggaacgattgcggcaaaaggaaagaaagaggatgtcatcacgtctgaaaatctaagtgaaagcatggatctaccgctagacgtgacgtggaacaaagggcgggcgtgggttcaagttttatcaaatgagaaggagtcaacagttagataaaagttatcgataaggaggtttcatgaaacgatttaataaactaatgtacggctggttttatattataagcccactagtatttgtaataggaagtattctgtggaagtactatttgtcggattttcctcttatggaaagtgtaacagataccctttccattcttggaatctattatttcttcatgagcattctctggtttttcaacatgaataaggttgaacgtgtttctcgtgagatggaaaatacgcataaccaacaacaaaaagatggatcaacttgaaaggtttcaactcgcttacatataaagaaatcacgatccgatatgcggtactgacgatttttctctctactacaatctttatggtaaagtacaacctaccgctctgggcttatctcatttgtatggggaatgcaactactggcgttgggttgaatcttgtgaaatggctgcgtggtaaggctagaagaatttcatccaaaggagatatcatacgaacgagtacaatatctttcatggctattctcttactgatcgtcccatttcattattcggttgtgatgaaactggtgatgattctcgctctattcatcgtaaatctgattgaatgtattaagctgaaaaataagtatcacctctcatgaaaatagacctaaatcatttgactcatttttcttaatgaatgtttgctatcatcatgttttatttaattgaatggtgataattttctaataatacattgacatttcgttaaacaaaagatattatttgaaacaatcattgttatcaaaactttatagcaacatttcttatcaagagaggtggagggactggccctttgaagcctcggcaaccgatgagttgaagcgtcaactcgtactgtgccaaatccagcaggtgtatcctgaaagataagaagattggcatcgttctcacaaacctttcttcttatgcttaaagaagagaggttttttatgtgtatcttagaagagaggagcatgcttcgtattcatacggttttaaatccgggtaaacaacttgtattacattgaattaaatatgcgaggtggattgtattgcattttcaggttatgaatagtccttttgatcaaaaacaaaccgaacttttaaatcatctgttaccaacgttaaatgaaacacagaaaatttggctaagcggatatctttctgttccaggagtggcagaagcagcggccgcaactgaaactccctcagctgaagaagcgttctcagagaatgtactaaaaacgcgtgatattacgattctctatggctctcatacgggaaattgtcagtcgctagcagaatctttttttgagcgacttgataacgaaaagtacaacgtaacactttcatctctcgatgattttaaaccaaagtcgcttaagaaagtagaagaccttttgttgattacaagtacgcatggagatggagatcctcctgacaatgcgctaagcttttacgactttatccaaagtaagcgagctcctgaattaggagaactcaggttttctgttctatcacttggggatagctcgtatgaatttttctgtcaaacagggaaagattttgacagacgttttgaagaattagggggcactcgactttaccctcgtgtcgattgtgaccttgattttgaagaacctgcggaggagtggtttgaaggagtgatgggcgtactgagtgatgcccagttcacgaatgaagcgtcaccttctaaagaagaagctacagaaacgagtgaaacatattcaagaacgaatccgtttaaagcagagattttggaaaatatcaacttgaacggtcgaggctcgaataaagaaacgcgacaccttgaacttgatcttgaaggatcaaatcttgtctatgagccaggcgacagtctaggcatttatcctgaaaatgataacgcacttgtgcttcaactgattgaagaaatgaattgggaccgagacagccaggtgattgtaaacaagcagggagacgtgcagtctcttcaggaagctttaacgaagacgtatgagattacaagtctaacaaaaccattacttaagaagattgctgagctcacggagagcgcagagcttctccacatgattaatgccgagggagaagagctaaagacctatatttatggaagagatctcattgatctggtgaaagattatggaccatggaagatcactgcagaggaatttgtcaaggtgcttcgtaaaatcccagtccgtctatactccattgcaagcagtccaaaagcgagtgaagaggaagttcacctaacgattggtgctctgcgatatgacgcacatggtcgagctcgcactggtgtttgttcgggtcagtgtgcagagcgatcacaggcaggagatacgcttccagtattcgttcagcgaaatcagaatttcagacttccggaaagctcagacacccctatcattatgattggggcaggtactggagtagcgccgtatcgcgcttttttacaagagcgagaagaaattggcgcagggggcgagacgtggttattctttggtgagcagcactttgtcaccgactttctttaccaggtcgagtggcaaaagtggttaaaagatggtgtgcttactcgcatggatgtcgcattttcacgcgatacagatgagaaagtgtatgttcaacaccgaatgcgcgagcgaagtaaagagctatacgagtggcttcagaagggagcgcacgtctacgtatgtggcgatgagaagtatatggcaaaagatgttcatattgcactcgtcaacattctggagcaagagggtggcttgagtgagtcggaagctgaggcttatctagcggatctacgtaacgcgaaacgctatcagcgtgatgtgtactaagcgtgatggaaggagtttgacatgaataaaaagacagcaacgcaagatggaaaaccgagtgaaatggagaaaattaaagacgaaagccactacttacgtggctctctggtcgaaagctttgcggatccgattaccgcatcgattccggatgcggatacaaagctattaaagtttcatggtagctatatgcaggatgatcgcgatattcgccaggagcggaagcagcagaagcttgaaccagcttatcagtttatggttcgtgtccgattgccaggtggcgtagcgacgccagagcagtggcttgtaatggatgatcttgcaaatcaatacggaaacggaacgctaaaactaacgacccgtcaaacatttcaaatgcatggcattttaaaatggaatatgaagaagagtattcaggcaatggattccgttttgatggattcccttgcagcttgtggtgatgtgaatcgaaatgtgatgtgtaacgcaaatccgtatcaatctgatatccatgcagaagtacatgaatgggcacggaaattaagtgacgacctgttgccgagaacgagagcgtatcacgaaatttggttagatgaagaaaaggtgctcgatcgaaaagaagaagagattgagcctatgtatggtcctcattatttaccgagaaaatttaagattggcgttgcggttccgccatcaaacgatgtggacattttctcccaggatctcggctttattgcgattcttgaagatggcaagcttcaagggttcaatgttgctgtaggcggtggaatgggcatgacgcatggcgacacaagtacgtatccgcagctgtcaagaatcattggtttttgttcacctgaaaacattgttgatgtggccgagaagatcattacgattcagcgtgattatggcaatcgctcagagcgaaagaacgctcgctttaaatatacaattgatcgaagaggacttgactgggttcggaacgaattgaatagtagactcggttatgagctagaagaagctcgttcttatcatttcgatcacaatggtgatcgctatggctgggtaaaaggggatggcaaatggcacttaactctctttatccaaaatggtcgaattgttgatctagaagattatcaaattatgaccggactacgtgaaattgcgaaagtccatgaaggtgatttcaggctaacaccgaaccagaatcttatcatagcgaacgtaccagaagaaaagaaagcggaaatcgatcaacttgtcgcaacatacggtctcacagatggcaaacaaaattcagcactgcgtcgaaattcgatggcctgcgttgccttcccaacatgtggtctagcgatggctgaggcagagcggtatttgccttctcttattgataaaattgaagagatcgtggatgaagcaggtctaagagaagaagaaatcgttatccgcatgtccggctgtccgaatagttgttcacgaccgacgcttggtgaaattgcttttattggtaaagcgcctggtaagtacaacatgtatatgggagccggattcgttggcgatcgtttaagcaagctctataaagaaaatattggcgaagaagaaatcctcgcttcgctaaaaccgattttatttaactatgcaaaagaaaaagaggaacaggagcatttcggagattatgtgatccgcgcagggtatgtggaagaagtgcgatcaggacttgattttcatagttaatgccttactgaaagaaacccaaagatcacgcgtgtgaactttgggtttcactgtttttataaaaaaatggaggtgcaagaatgacttatagcatggtttcccatttaacttgtccaaagtgcagcgaaacatatgatgcagatacgattcaacagctttgtgtttgcgggtcgccacttctcgtcgattataagcttgatgaagtgaaaaagttcgtcacaaaagacatgatagcagagcgagagcagtcactgtggcgataccatgagatgcttccagtgaaagatcgaacgaataaagtaagttttgaagaaggaatgacgccaatcttgccactcccttctcttggtaaggaaatggcgattccaaatttgtacataaaagatgaagggatggtcccaactggttcatttaaagcaagaggagcgtcagttgggatttcaaaggcaaaagagcttggtgttcagaacttagcgatgccgacgaatggaaatgcaggagcggcctggtctctttatgctgctaaggcaggattagaagcacatattgttatgccggtcgacgctcctgaaattacgagaaaagaagtaagtatttccggtgctcatctttatcttgtcaatgggttaataagcgacgcaggcaaaatcgtaggtgatctcgtgaaagaacagggattctatgatgcgtctacgcttaaagagccctatcgcattgaaggtaaaaagacgatggggtatgaaatagcggaacagctggattggaagcttcctgatgtgattctttatccaactggtggaggcgtcggccttatcggcatctataaagcgtttcttgaacttcaacagcttgggtggatcaaagatgagaagctcccgagattggttgctgttcaatcagaaggatgtgctccgattgtgaaagcattcgatgaagggaaaatggaatcagagttctgggagaattcaacgacgcatgcgtttggcatcaatgtaccaaaagcgatcggtgattttcttgttctagatgcaatttatcaaacaaatggttgtgcgattgccgtttctgaagaagagattcgaacatctcagcgtgaggttgctgggcgagaagggcaatttgtttgtccggaaggcgcagctacatttgcagctgccaaaagattaaaggggtacaattggatcaaagaagatgaaaaggtcatttgtttaaatactggcctaggaataaaatatcccgacgcatttcatgtgaatgcgagaacgatggaaccttttgaaaggattagttattaactgaatgggcaccatgcttagcataataagcgtggtgccctctattagccaaggtattgctttgaagtcataaactgatcatccattaacacgtagggatgagtttccattaagatggtaataaggtaatcgggcatcctttccccatcataagcacagatgagtggaaaagagaggtcatttacagcactatcaacaattttttcaaaatcttcgatcagatgaagtggttcttccattgaagcccattcgacgtgtgcccaggaacgaaaggacaggcggttttcgacataaggggccacggtctttttaaaatagtcatgaatggctgggggatgatagcttccacttgaaaagtagaaatcaaagctatttactcggtgaacatagttcaactgatgttcggtgaacttaagttgtaattcttttaaaatcattggataaagacggtcattttcaattagaatcgtgtactcttcgttcgctattccttgttcaataaattcgcaaacttgctcaagataacgctcaatcccctgataggcataaagcacatgaacgcactttttctctacgaacagctggttcattttgcttttcaagtgatcactccccgaaaatcgtttatgtatagtttactacaactgccagaagattaacatgaggtttgattattgttgacaaggagggcgattatgtatgcatccagaaatcaaaaaacatttcaaaggattagaggcagaagataaaaccgttcagtatgaagcgtttcaagcgttgctccaggtaacaaaatccgaagttgaatgggcttatgaagtctgggatgaattagtagaagggctatcatcaaaaaacaatcacacgcgctcacggtgtgctcagctgctttcacagcttgcgataagtgatcccgagaagcgaattctggttgattttccaaaattatgggcggtcacaaaagatccgaagtttgtaacggcaaggcattcttttcaatcgatttggagagttggattagctggagaagaacagaaagtaatcgtgatgggtcaccttattactcgttttgaacaatgttaccaagagaagaacggtacgttgattcgttcagacatcctgcaaagtcttcattctttatatgaagaagtaaaggaacaagaaataaaagaacgtgcacttcagttaattgagtttgttgatgatccaaaataccaaaaaaagtaccgtgctatatggaagtaagcatatactaatcaagccagctaccgcctaatagcggaagccggctttttttaatcaattgggtcagctgactttccgtagcgaagcacatcaaatacagccataccatcactcggtctcccgtcatcatttcgaaatggcataagagaaaagaaaataaaatagatcgagaaatacgtgaattgatagaaaaagagcgtaacaggaatcatgtttgatgtaattaaataattaatgatcaaaatgacaattaagttaaataagcttcctcctaaataaattgcaacgtgtgcccaggttttgttatatgttaacttttcgtattggcaccagccctccataaaatactttcttctaacttcgagtgatgctatttgaaacagggtacgacctgtgccgatacaaaatttcactttgcctccaaacagccttgcaatcaaaacatgaccggcttcgtgaacaagcgttacgattggtaaaataataaagaaattgactaagaacatcggaatatcgtttaacgtaaacattgtctacctccagaaggtgatcgttgtactataaagtaggacgttcccgaatagatcgattcctaacgctttttcagtaagcaacatgaaacggtaataaacgaaatcaattcgatacaatttttacgtgatgaaattcataccaagaaaaaggaaatcatgggggaagagggtaaatgttaaagagagcagttaataaggagggttcatacatgtacgaactgaagacgaaagaaacggataatagtgtcattgaatttattgaaagtgtcgatcatccaaaaaaacgggaagatgggtatcgcttgttagatctttttactgaaacaacggggtatgaagcaaaaatgtggggaccaagcattattgggtttggctcgtatcattataaatatgctacaggacatgaaggagacgcaccgctcgttggattttcaccaaggaaggcaaagattagcttatacctcgctcaaggtgaaccggaacgagagagaacgttagaccggctcggtaagcatacgacaggaaaagcgtgcgtctatgtgaacaaattagatgatattgatcttaatgtgctgaaagagcttataaaccaatcaattgtttatttaaaaaatatgtatcaggagcattaatgaagggatgcttaccaaatattgaaaacccaaaaatgataatgaacacaaaaggtcaggctatagcccgaccttttgtgttgaacaatcacttattgaacggtcatcggttgaagaacgaccgctttaatcgctccttcttttgaatcggaaacaaaggaaagtttgttttctcctgcgtgatagacatggagatattcagaatctaattcgttaaatacaacttcgtcaggctctccaaactgacaaaccacctcagtataaggaatggccggcccttctgagagcgcattgtagcgcaggtcgcttactttatcatttgctgttaagtaagcatagttatcatcataaaaacctggtgttccttcataaaaagcttcgtcgtaagtcatagaaggcttaagttttttcagagcttcttcagacatacctagaaaaatcgacgcatcttttaagtggccctgctcggcaaattgcaaaaggtctgagtgaaaaggtgctttttcgcacgaagccgtctcagctgcttcggcaggctcctggtctgtcatcgtataatctccattaaagccaacggcagcatcgtgataattaaggcaagagtcttcaataaaagttacgacgtcatttgattgaataaatgtcccagagcatgctgggtcttctgtatcctggaatgttgcttcatttccgtttattgtagcagtccctttcagttcaccatcgtttcctccgctacttacatcaatggtaaattgaaaagaatcgtttgttacgtttgatatgcttaaattccctcgatcaaatgctggatcaatgtaaagggcttcctgccatgaagcttcttcagcttcagcttcgacattttcttctgttggtgaagccgacgtacctacttcgattttcgtatacacccctgtaaaggaaacctggctttcattcaaactctcacaaacttcgcttgtatcgatcgttaatcgatcttctttccagccaaaggacactttgcattctgcgttttcagcgtgcgtaaaagatgccatttctccgttaacttgagcgatccctgacaattcaccaatgttttcaccatcgtatgcttggagcataaaagtgaaggaatcagccttcggatcggtaatatcaagtccaccgagaatttcgccatctttttcccatttgtacgtgccttcctggaagagaacttctttggtagtctcttctgaagacttgtccaccgtttctttttcagcttctactttttctgaggagtctgaggttgtgaggaaattacaagccgacacagtaagtagcaagataaataaaaacaccatacggagcgttttcatacgattcctccctattcaagtaagttgatgtcattattatacataaggttctgtgaaagaaaggcatattggtgtcgatacacaaaaaaatctcttgtctactttgagcgaatattcgtgtaaactagttgtccatttccggggaaatgattggaagaagtcgaacgatttcttaacgacgattagataggaaggattgtggtgaaaactgactgcgagggtttaaaggaaaattcgctgttgccaattaagcaaaggggcgattatgataaatgaaatgacgttcgacatgactttcatatggtgggatgaaatgaaaccctttacaaaaattaaacgaatgctatggaatccaatccgcaggagtattttgaaaaaatctgtgctcatttttatttttcttcttgttctcccaacgcttctcatttatcaactgattattaattatgctgaagagatgatcgaagaggatattatcagtgcaaatgtagccagtacggaaagcattgtgaaacgagtgaacaatgaaatttcgagtgtcgtgctacagctccatttaattgcaggaaatagggaagaaagcaacgtggatgtggagcgcatgtatagtcgatcaagacaggcgattgctcagagttcgattattcgatcggtttattacttaaacaatgaaagcaaggtgatgtttgaatcaccttttgcacctgagcttgagggaacgtcttatctttatcctaaattaaatgaaatgcagtggacccacaactatgcagtatctaatgtgattcaaaattacaacggagaagatgttgtttcggttggcattcctgtttttaatgaaagcaattcattccaaggggcactaatcgctgaatttagccaggattatttatctgaaattgttgatagcgtcagcacaggcgaaggacattttggcatgctgattgatccggaaggggttgtccttgcttcaacgaatgacgaggcggtaggagagcttatttcaaacgatcttccttcaaaacgaatctttaaagaggtttcaggagtatcgcgttctgtatatgaaggtgatcaaagcattattgcctatcaaacccttcgagatggttgggggcttgtttatggcgtgtcagaagaaattgcttttgctccggttagaaagctctcttatgtactcactttatctttcgttggcattttgattctttcgtttttgttcatcgttgctggtattcgggacatcgtttacccgattatccgtttaacaaactatgcaaaagcttatcgcagaaaaaccttttatcaggaagaagagagctcagaaaacttacgaaaagacgaagtgggggaattaacaagaacgattatctcggttggtaacagcaattatgagaaacagcaccaattagaagagagtgaacggtacttaaatgacatgattgaaggaattccttatggcatgattacaatcaatgagcaagctgtagtcacccatgtgaataggcgctttgaggatttggtagggtttagtcggattgaacttgttggccgccctctctctcagttaccaattaaacatacagatgaagattttatgttattaaaagcattgatctcagtagagccaagtattgagtgtgagagttacattattgatgcgaggggacaacgtcatattgtcaatatcggaacgtctcgtttctataatggcaaaaatgaaattatcggaagtatcgccgtattgcaagatatttctcaaatgaagatgttggagtcacgcgttaagcagaatgacaagcttgcattaatcggtcaaatcacaactggtattgcgcatgaaataaaaaatcctcttgccattttaacaggatcttctgagatgttacgagaagaagtggaagaagcaaatagttcggaggacattaaagaactagcgcgtgatattgatcatgtggtaaaaagaatgaaaacgattgttaataatttcttgaattttgcgaaagtcaataaagctgacgctcgatctcttcacttaaagactgtcattgatgaggtgcttcatctcgttcgatttaaattgaaagaacgaaatgtgaaggtcgtcaagaaatatgaaacaaatggtgactacatcgggtattatgatgaattgattcaagcttttctaaacattattttaaatgctgctgatgcgataaaagaagatggaacgttaacagttcgtttgaaggaatacgaaaatcaacttcatgtggcatttcaagatacaggcacaggtattatggcaagtaatcttgagtggctttttgacccgtttttttcaactaaagaagatgggaatggtctcggtttaacgatcgcacgagatattattcgtgagaacaacggcgagcttacagttgaaagcgttgaaggaaaagggacaaccattcattgttggtttcatcgatagaaaaggagctggcactatggaacaaactgttttaattgttgatgatgaaatgcaacttgcgaaattaattggacgtaaattaaaaaagacaggcttaaatccaatcatggctcatttaggaagcagtgcagtcgatttatttaagcggacggatgtttccattgttattcttgattatatgctcccggatacgactggcctccaagtattgaaggaaatgaagaagataaagcctaatgtaccagtcattatgatgacggcatacggaaatgtggaaagcgccgttcaagcgatgaagcttggtgctgttgattatttgaataaaccgatggagcttgaagaagttaaaaatcttgtatggaagcaactgagtacaagggaagagcgagagcaaccagaagacacatttcattttgaaagcgcaagtatgaaacgagtcatgtcactgctagagcaagtgaaagagacggatgcaagtatacttgtgcttggagaaagtggcgttgggaaaacggcgcttgcgcattggattcatgagaacagccatcgaagcaaaggtccgatgctgtcgatcaactgtgctgctattccagagcacctccttgaaagtgagttgtttggctatcaaaaaggtgcttttacaggtgctgtctcatcaaaactcgggaaatttgcggctgcggacgggggcacgatttttcttgatgaaattggcgaggtatctccggccatgcaggcgaagctccttcatgtgatcgaagataagaaggtgatgcagcttggtagtaatgactaccgcacggttgatgtacgaatcataacggcaacaaatcaaaatctaaaacaatctgttgctactggtacttttcgagaagatctctactaccgattaaatttaatagaagttgaaattcctcctctgagagagcgggtggaagatattccacttttgattaaggaccaaatgagaaaattaaatgcaaaatacatgaaaacgatcaccatttctgaggagagcacttcacttcttcttcgtcattcctggccgggcaacattcgtgaactattaaacatcctagagcggattcatattgtgaagcgaagtggcatgattatgccagaagatttagcgcatgcttcattaatgtctcttccgaaaactgaacgagctgacgtacaagactttagcggaagtctttcagaagtacttgaaggtatggaggagaaaatgattcgtcaggcgctttccgagacgaatggaaatcaaacgaaagcagcagagaggctcggaatagcgagacatacgttaatttataaaatgaaaaagattgggatcagtttatgagaacgttgttttgtttaattggatgtctcttgcttctcgtggcctgtgagggtgaagagaatcagaagaaagacattgctttgtcttctgaaggtcctacaattacacttggatcaaaagcatttactgaacaatacttgttaatgaaaatgacggcgctactattaatggaggaaggatatgaggtaaaggaagttcgctttcttgatagcccgtcgatccgggaggcttttcttaataacatcgttgatctttattgggagtatacgaatacggcgaaaatcatttaccataaggatgggcctggatatgatgcaatggaagcttaccaattcgtgaaaaaagcggacgaaaaggaagagatcatttggctcgataagagtgagtttaatagctcatggggattaattatgaaaaagtctttcgcaagtgaaaagggcctcacatctgttagtgatctcgttgcgtatatgaataacgacgatagtccagccttaaaaatggccacgaatgatgagtatttaattcgagaagatggccttgatcatttagaagacgtttacaattttaaagtgaatcaggatcagcttctggccgtggattcggaattgcttagtcttgcagtaaaggaagaaagggttcaagtggcggttgggatgattacagatagtcgtattgaagactacgatctcgttattttacaagataatcggatggctttcccaccttatgacgctgctcccgtagttcagaaaacgattttagatcttgatccagaaatacgaggacctctcgaaacgcttgcgagaacaattacaaacgaagaaatggttcatttaaattaccgcgtagatgtcttacatcaggacgtaggaaaagtggcaaaagactttttacaacaatcaggattattacctgatgaataaaagcgactatgataaaatttaattagatagctagaaaggtagttgagttgttctggatttcatttcaaataatgtcgttttgcttggagtatcttgtatcataattgctcttctattagcaaaattcaccaagaagaagtgaggtgctgttcgttggaacagcatcttttttctgtgcaaaaattcgacactgtagagaaattctacaggtaagtgtagagaatttctacaattcgttcagtaaatggataagaatcgctacaaatacaggctataaaaagttggcacgttacttgcaatataagtatgtgaaaaggcagttaaaacgaaaaaaattcctagctcgattagctatttactgctattaaattctttcgcctaaagatacgagattatcccattaagaaaaccaaaaatggaagcgctccaaaaactaaattactttgaatcgcaaggagctagaaagaggtgaaaatgattagacgcgaatatgactcgtttggttcagtggaagtgccggatgatgcgctctatggaaatcaaacggttaggtgcatggagaaccttagcttttcaggtaaaaagctttccgattatcccgcttatattcaagcattaagtatggtgaaaaaggcggctgcgatgacaaatggtcagatcggtgcgattccgactcatgtacaaaaagcgatcgtaaaggcttgtaatgaactgatcgctggagagcatttgaatcaattcccaattgatccttatcacggaggcggtgggattgggacgaatatgaacgtgaatgaagtagtggcgaatttagcaaacgacgattttggacatgagcgagggacatataaaacagttgggttagaccatgtaaatgcttcacaatcgacttcagatgtatgtcataccgcaattcgtcttacgatcgcccatcagcttgaggcattcgtacaactactgatctccttacaggatacgatgaaagaaaaagtggaacagtggttgcaagtttcaactatttcacgcacctgtttacaggatggaatgagggtacagctcggagattctttgtctggtgttgtcgccatgcttgatcgacgaatcacttcactaagacaatcaattcaccaaatgcacgttattaaccttggcggaacagtcattggctctggaatgggggcttcaaaagactatcgagaaaacattctcgttcatttgagaaaagcgacagcaagatctgttacgcaccgctccaatttatatgatgctgctcaacatgtggatgaccttggcgatgtttcaaatgagttaaaacagcttgcgaatggattaatcaaatttgctaaggatttaagactacgatcatctggacctgaagcgggatttggagagctcattctacctgctgttcaggcgggatcatctttttttcctggaaaagtgaatcccgttttaccagaaacgttactgcactgttgcttcaaaatacttggctatgaccgtactgttcaagcggtgttggaacatggagagctcgatttgaacgtatttgaaggagtagcaggaatggcgattttagatgccatctccttactagaaaaggtgttgccggtttttcgagagagctgtttgaaagagataactgctaatgagaagcattgcaaagccctttctgaaacaaccgtgccccttgtggtcgatctaaaagaacaatatggatatcagactgtctcgaacgcgttagaaatgaatggaaaagaaggcttacgtcaacttcaagcaaatgggggagatttttaatgaaacatgtacaaacaaaattcgaaggcattaagcaaccaaaactcgagtgggccaaagaatggcttaaagaaccgaaaaggctttacatcaatggtcagtgggtggaaagcagtagcgcagaaacgattgaatcgattaatccagcaacaggcgacagcactggttcaatctttagtgccaaaaaagaagatgttgatttggcagttgctgcagcaagagaagcatttgatcatggaccgtggaaagaaacaacgcgtaaagaacgagctagaattcttcgtgaagttagtaaactgattcttgatcatcaagatgaacttgcgacacttgagtcactcgataacggtaagctttacacagaagcctataacgatgatgtgcaagaagcctctgatctttttcaatattacgcagggtggacagataaatactatggtgaaaacaatcccgtcgaggggaatttcttaagctacacaacgcgtgatccaatcggggtttgtggtcagattgttccgtttaattttccaattggaatggcggtgtggaagctatcacccgctctcgcgatgggcaatacggtcgtgttaaagccttcaagtacaacatcttactcggcgattcgtctcgttgaaatcattcatgaagcaaagcttttaccaccaggcgttttgaatttaattcttgggaaaggttcaattggatcttacattagtacccatatggacgtggataaaatctcgtttacaggtagcactgaggttggaaagaagcttgttcatgattccgctgattcgaatctaaagccggttactttagagcttggtggtaaatccccgaatattatttttgctgatgcaccgaatcttgaaggagcgatcgagcgttcattctttggattatttactcataaaggcgagaagtgttcagcaccaacgcgattatttgtcgagcgtcctgtttatgatgaagttgttgaaaagatcggaaagtatgcaagcgcatacaaatgcggtgatccttttgatccagaaagtgatcagggtcctcaggtttcagaagcccacatgaacagcattttacattacattgaaagtggcaaaaaagaaggggcccgacttgtggctggtggtgaacgtgatgttgatggcgataaagcaaaagggttttacgtgaagccaacgatctttgctgacgtagcaaatagcatgacgattgcgcaggaagaaattttcggtcctgttctatgtatccttccatttgattctgaagaagaagtgatccggatggcaaatgatacgatttatggtcttgcagctgggctttggacaaaggatgtttctcgcgcccatcgcgtcgcgagaaaacttgaagcaggtatggtatttgtgaataaatacggttgttatgatttcgctagcccgttcggaggctggaaacaaagcggctggggtaaagaatatgctgtacactcgcttcaatcgtatacaaaaacaaaagcaatttgggttgcttactaaaagagcggaggaaagagtatgaaaatgaaagcggctgtaatgacgggtctaggggcaccgcttgaaattcaacaagtggagcttgctccaccgaaagcaaatgaagtgcttgtgaagattgctgcgacgggtgtttgtcatagtgaccttaatgctgtacaggatccttctacaccttttccgacgattcttggtcatgaaggtgctggaacagttgtcgaagttggtccaaacgtcagaacagttaaaccgggtgacaaggtagcactaagctgggtgccctattgtggaacgtgtgaattctgtgtgacgggtgcgattcatctctgtgaatccgcttttggtccaatgtttaagggtacgcttcttgatggtacctctcgccttagcaaagatggacttccgctttttcataactcgcttctatcgacttttgcagaatacgccgttgtaccagacatgtcttgcgtaaaattaccggatgcgatgccacttgcgcaagcttctctcatcggctgtggcgttgcgaccggctatggggcagcagtgaatgcggcaaaagtgacgccaggatccacggtcgcagtgtttggaatcggtggggttggtgtcaatgcgatccagggggcacgaattgcaggtgcttccaagatcattgcctgtgatatgaaaccagccaatcttgagattgccaaacaattcggtgccactcatacggtgaatgttagtgaaggagatgcgcctgaaatgatccgtgcgataacgaacgggtttggcgttcactatgcaattgactgctcaggtcacacagcagctacaacgaatgcatggaatgcaacacgaaaagggggaacgatcgttgttgtaggagcgtttcatcctgaaatgttgcttagtcttccagcgggtggtttccaccgagttggaaaagtcattaaaggaagtttttacggagatacacagccatatcgggattttcctaaaatcgcagagctgtatatggatgggaaatttatgctcgatgaactcgttattagacgcgtttcgttagaggaaattaaccaggcgtttgactcatttcacgactgcaactgcgtcaatgttggacggtctgtcatcgattttcaaaaagaaccggttacaaagcgcgaatattttccggaatttatctgattcaaaaaggccgctcaaaggagcggcctcacatacaggataaagagataattaattgagaggggttactactatgaagcgttttaaacatccggtattctggccaccgtttctactcgttcttgcggcggcgatcattagttttaccaataaagaagcattcatttcggttgctacaagtatgaatgattgggtgattgcaaatctaggctggttatttagcattgcaggtctcttaatggttgtggcgtgtgtcgccgtctacttttctccacttggaaacattcgcatcggtggtgataaggcaaaaccaatgcttaagccacttacatggtttgcgattacattaacaacaacgattgcggctggtctaaccttctggggaattgttgaaccactttatcacgtatctgcccctccagaatcgctaggcatcgaaccgaataccccagaagctgcaatcttctcgctttcgacgatgtatctccactggacaatcacgccatacgccatttactgtctgccggcaattgtgtttgcgtttgcttactataatatgaaacgaccatttagcttaagctcaacgcttgctccgttattcggggatcgacttaatggaaagtgggcgaatgtgatcgatgctctttgcctttacacgctcgctcttggaatggcatcttcaatgggtacgagtttattaaaccttggaggtggtgtcaattacatcacagggatcgcgagctctccaactctttgggcagccattgcaattgcattaatggtaacattcatcgtttcagcttcaactggtttaatgaaaggaattcgcgttctttctaacatcaatatgcgtctgtttatcggtattatcatttttatgtttgtcgtaggtccaacttcttacttattaaatcttggcacagaatcggcaggaaattattttacgaacttctttaacaaaagtctctttactggagcctctgctggtgatcagtggccacaatggtggacaacgttttattgggctagctggttctcgtgggcggctattactgcattgttccttggaagaatagcatttggatataaagtgaagcaaatgattttagttaactttgctttgcctgcgttctttggaggtctttggatgacgatctttagtggaacagcaatcaatatggaaatgaatggtgctggtcttgcgaatataatgaatactttaggtgcagaagcagccctttacggagtatttgatgctcttccacttgcagcgattgtgattccaatttacgtatttatcgtgtttatctcatttgtgacagcagctgattcaaacttagcggcaatgggcggcatttcttcaacaggaattacgccaagcagtcctgaaccaagcgtactgattaaggttgtttggggagtaacggttagtatcgtagcctgggttatgattagctatgcaaacattgatggaattaaaatgttagcgaacttaggtggggttcctgccctgttcctttctctctttgttcttggttcattaatgaaaatcattcgtaaccctaagaaatatgaaaagtttgaagatgtagaagaagcttctggtaaggtagatgttaatcagaaggataaagcggtataggtggaagggacagacatcaagtctgttccttttttcttgaatggattaccgtatgaacgaatcgtggtacactaatgctagaggagtgaagataataaaatgggaaaatgtacaattgatcactcatacgaagatgtgatgacaaagctcgaaaaccaatcagcttatatgccagattcgcttgttcaagaagcttatggctttttacatcaaacgatcactcaggaaacgttgaatgagatttttcatttattaaagaaatatgatcttgctccagaggaagatcgacgaaaccgagatgctgagcttcgaaagctcatgaagtaattgcagctagaagagaatgacggatagaaagaagtgataggatatgacgacgaaattatattataaagatccctacataacgacttttaccgctaaaaaatgtgagcagcttacggatgaggaaaatcgatcatacgtcgttttagatcaaacggcgttttacccaactggtggaggtcagccgtgtgatactggaacgctaaatggcgtacaggttcacgatgtagaagaagtagaaggcgaagtacgtcactatgttgacggcacgcttgatgatgagcaggttaaaggagaaattaactggacaagacgctttgatcacatgcagcagcatgcaggacagcatattctttcagcagcttttgaagatcagcttggttatagcacagtaagctttcatcttggtcaagaagtttgtacgattgatttagatgttgctcatctgagcgaagaagatgccgaagtagcagaagagtttgcgaatgatgtgattcaacaaaacctgccgattgaaacgaagtgggtaaacgttgaggaattggcgcagtattctcttcgcaagcagctcgctgtgtcggaaaatatccgactagtgatgattccaaatgttgactatagcggttgtggagggacgcatccttcttcgactggcgaagtacgtgccatttcaatattgaaaatcgaaaagcagaaaaaacaaacccgcgttcattttgtttgtggaaagcgcgtgacgaatgagcttcgaacaaaacaagctgttgtgctagggttaacgaacgtattgagcgttccggaatctaaacttgtcgatgcggctgaacgcgttcttcttcaatcaaaagaacatgaaaaaacgattgatgagctaaatgaaaagctactttcatttgaagcaaaagaattattgcaagcagcggaaatgattcacgatcaaaaagtggtgcaaatgatttcatccaaatacggaatgaaagatcttcaaaagcttgcgaaaatggtcctaaaggaagatccagaggtcgtagtatttttcgttagtgaaggcgatcataagcttcagatcgtgtgtggtagaggagaaaaaatcgatcaagatatgaatcttgctttaaaaaaagtactccttttcattaatgggaagggtggaggaaagaaagactttgcacaaggtggaggagagcccattcgctccgcagaagaagtattaattgagcttgtgaaagcaacgttccaataataaatgagcgcgctgagatctcagtgcgctttttttatttggaaataaaatgaaaataacccttgccttacaaggtagtttaaccaatctcataactcttgcataacaagtgttatgagattaaaggaaaaggtgaaggacatgcaaacgacgcaaatgttaaaaggcatcattgatggctgtattttatccatcattcatgaaggagaggtttatggctacgagcttgcctcaaagcttgattcgtacgggtttgagtcgtttagtgaaggaacgatttatccaattctaattcgcttacagaaagatcagctgattcaatctacattaaaaaaatcgacagctggtccgaaacgaaagtattattcattaacggaaaaaggcgaagaagagttagtacattttcaaaaccggtggcatcatttaagcacgactgtgaatcaaattttacacaaaggggagagagtaagaggatgacgaaagaaagtgagaaattcattcaagagatgcgcgtttacttgattacgaaaggtgtaggggaagaagagattgatagttttctaatggaggcagaggatcatttaatggaaggtgaaaaagaaggaaagacggctattgatatttttggacagtctccaaaagcctatgcgaaggagctcatagcgtcgatggagcagtcgccacaggataatcgaaaattaatctcgcggttgctctttggggtttttggtattttcttagtctcacagttgatggacgggaatacagctttctcgttaattgagcttattggttacccggtttcaatgattgtgtggctggtggcacttgtaggtgctctgcgggtaagttcgtttcacagtggaataaagagctttcttattgtttatggaatcacgatgatcccaatgcttctcacaataggtgtgacgattcttcacctcgagtatggaacggaccttctgtttcttaatcaaccagttgcttttacagtaggcggtattattattctaggcttaattgctaactttacatctcttataggaatcttatcaagcctactgttgatgttgattctttttggaagccagctacttgtaagtattcttcagttggaaggtttcgcctgggagataggagcatatgcagtaagcgtggttgggcttcttatgatgattagttttcgtaataaattgcctaaggcattgatgaaaggatagaatgtgcgtcgtagtgctaaggtgattttcatttgatgaacgagatggccaacccaagttagcaggccatttcggttcggttaaaaactttctaaatcgatttctgatctaatcgtgcatctgcgcgctgactcgatcggttcatcatttttacacgaaaactgtgcaaaatgattcccacaataatgagaataataccgatccaggcgatggcatttggaagagggcttgatagaagcattccctctccagcgagaacaaacaatacttgcgttgattgtgtcgcttcaacagaggcaagtttcgactggtggcgtctcacacgatcggttgcgatgaagaatagggttgttgcgataacccctgaacagacggctacgataaaggattgaatcacctgtccacttgaaggtagtcctacgtttggaatcgcaaagacacataaaattatccaaaaaggcagacttgcaagcgtcatgccaaacacacgctgaaacgtatcaaggcgtccgtcgcaaatctccatcatttttcgatttccaagaggataggcaaatgacgcaagtaggacagggagaatcccaataaaaacttcattccatgaaagatcgctcgctttttgccattgaatgaggataacgccagcgagaataatggttgatatgagaagcgctctcgtttggatacgatggcgtttttttatcgggcctcgtttcgtctcaatcgttgagaagaaaagcggagcaacgagaatgccagctacaattgtgatttgccacgtgccagcaacaagccagcctgctccgtatgatgctgcgtaggttaacggcgcataaaataagacgaatccaacaaaactccagctgaaccattgaatggggtgcttcttcatttcaataagaacttgtttcatgttccgtctaacgagtacaatgataagaagaaaaggaaccatgaataggaagcgaagggaagcgctccacatccagctaccgcctgctaattccattgatcgattaagtataaatgttactgcgaaaaacacagaggcgagaatgccgagagctatttccttcatacttatcacttccttttgataaattatagtttactattgatataatataatatactaaatgaataagtgaagaagtacaagaaaaaattggagagaggactattttgtgagcgatcaaaaagaaaccaatgcacaaaaacttgctcagcaagttggcgcaacgttaagaagtattcgaaaagagcgagagatgagtttgcaggatcttgctgaggtaacagatgttagtaaactgactttagggaaaatagaaagaggagaagcgaacccttctttaacagtcatatggaaaatagcgaatggcctttccattccgatctcaagtctacttgcagaaaaagaagaagtcgtaatttcgagaaaaaacgtaggaaataaggtattgagctcgaatgaagatttgacactcgagccgatgtttacgactagtggctatggttctcttgaaacacatcgtgcttttctaaaaccaggtggtacctattatacggaggcgcaccaggaaggtgtgattgaatatgtcaccgtgatggaagggaaggcaaccgttcaagtgcaggagcaaaggtacgaattaaatacgtatgattcaataaagtttaaagcagatcagcgacatggttatctgaatccaaatcaggaacctgctgtgcttcatttcgtcatgatttatcctaatgctaagcaacaaccatagaaaaaagccacaggactgtggcttttttcttgtcattatttattataaactgctaaacgatcaatgagctgtgaactctcctggttaacaccagttactttcacatctatttcgttttgcctgaatttcataatcactttatcgactgcgccaacaccagagtcatcccagacgtgagcatcagataaatcgatttcgacagctttgatgccttcttctttgtaattaaagctattcacaaagtcagtaacagatgcgaagaaaagctgaccgtgaatgtggtaaatctttttctcagtgatttcgtcgattttttcttcgacgcgtactttagagattttagaagcaaagaatagggcacttagaataaccccggcaagaacgccttttgatagatcgtgtgttgtgacaactgtaataaccgttacaaccatcacagctgcgtctgaacgcggcattttgtgaaggtttttcagtgagccccaatcaaatgtaccgattgaaaccataatcatcacgccgacaagggctgccattggtattttaacgagtagatcgtttaatactaaaatcagaatcattaagaaaacaccagcgacgaatgtcgataagcgtccgcgtccacctgatttcacgttaataaccgattgtccgatcatcgcacaaccagccattccgccgaaaaatcctgcaactacgtttgccataccttgaccttttgcttctttgttcttattgctatccgtgtctgttagatcatccacaatttgtgcggttaagaacgtttcaagcaaaccaacaacagctaaagccattgaataaggaaagataatcgcgagcgtttcaaagttcagtggaatactcgggatcaaaaataacggtaatgcttgtgttaattcacccatatctccaaccgttcgtacgccactgtttagtgaaatcgctacgattgtgatgacaacgatcgcgataagtggagacggaacagctttggtgaagcgtgggacaatataaataatcgcaagagcacctgctaccattagatacattggccaagattcaccaacaaagtgtggaagctgtgaggtgaaaattaaaatagccagtgagttaacaaatccaatcatgacagaccgtgggacaaacttcataaagcgagcaagtttaaatacgccaaggaagaattggatcactcctgttaagattgttgctgcaagtaaatattgtagtccgtgatcggcgactagcgttaccatcagtagcgccattgcccctgttgctgcagaaatcattcctggtctaccgccaacgaatgaaatcactacggcgatacaaaagcttgcgtatagtccaaccattggatcgactccagcgataatggaaaaggcaatagcttctggaattaaggcaagtgcgacaacaatgcctgctagggtatcgtttttcacattgccaaaccaatcttgtttaatagaagataagttcaatgttgcacctctttctaaatctattattgtgatgactcctaactctcatagaagtcgggtccgtttacaacatgatgaagtttagcacagaatctatgaaaatggaaataggtatgtaagcgaaaatcataagtattattcttatgaatactcctatatacgcttatattcgcatggatttgtttttgataatttactagtaacactataaaaataagtgattgcacctgtttttaatctaaaataacctaatttgatataacctgttataatgagttatcgtattggtagagttttggtccatagtcgaaagaactttgttagaatagggtgatagattgataaggagcgataacatgagtcaggataatgagcatcatgatattatgacaatctctcaagtggcgaagtattttcaaattagtgagatgaccacatataaattagttcaggatggcaaaatcccggcttttaaaattggcagtcactggcgtattcaaaagtctgatcttactgaattaattaagaagcttaagaacggtgagaggatttagacgcgctaaacgaagaaagcccgatgaaccaaacggatcatcgggctttcttcattacttatgaagcagaagcttctcctctaagctcattttcaatgtcttcaagacttcttccttttgtttctggtacatatttcatgacaaagaagaatgcaaatacgccgattacagcaaagatcacaaatacccatgctgtaccgagagcaccaagtaaaactgggaaaaataatgaaacaattaggtttgatgcggatagtaatagcgtcgtaaatcctgtcgctgcgccacgtgctttattcgggaagagttctggtagcataacccaaacaaccgggccccaagtggcggagaaaaacacgataaagagaccgagaaagacgacggttaaccaggcaatcgtcgtggttagttctgcagtaaagagaatcgttgcaagaaccgctaagcttaacgacattccgacattaccgaggagtaataatttttttcgaccgagtttatcaatcgtagcgatggcaacaagcgtcattaagacatttacgattccgatcccaagcgtgcctagaatggaggctgaatcaccgagaccagctttcgtgaaaatggtaggtgcatagtagatcaccgcattaataccgattaactgctgaaagatggcgatcccacttccaacgagaagcatcggccgaatccattttgatttaagaacatcccacgtgctttcttccacttcttcaatcttcttcatttgcttcatttcttcatcaatttcatcttgctttcgcgttaaagccatgacgtttcgcgcctcatcttcacgatttcgtttgatgagccagcgcggactttctggcataaagagaacgccaatcattaagacgagtgctggaatggaagcgagtccaagcatccagcgccatccctcaattggtgcaaaagcataattaatgaggtaagcaaggacaattcctatcgtaatcattaactgattaagtgaagcaagtgcgccccttgatctcgttggcgccatttctgataagtatacaggtacaatggctgtggatcctccgacagcaagtccaagaataacgcggccaataattaaaacgacagcattcggagataaagccaatacgagtgaaccgattaaataaatgagtgcgattgcaaaaacaacccgtcttcgcccgaaccggtctgagacatatccgctcatgccagcccctacgatcgcaccgcctaatagcgaactaacgacaaccccttgtagaaaatcggataatgggatgtcttgttcaataaataataacgcgccagatatgacaccggtatcatatccatacaataatcctcctagcgccccgaagaaaaaaatccaacctttgcttatgtttcttttcatagaagtaaccaccttttccacaacttccttcttccaaataacttccacttttttgttggaagcaaacatgttgtttgagaaagaatgtgttcagaaaagaaaagctcttttcttgacttgtgacacggtgtcacatatagtgggggaggtgatgtgacattgtgtcataattttgttggtaggtgatttaatgtgccaaaagcaacgttctttaatttaaaagaagaaaagcgacaaatactaattgatgcagcgaaacaggagttttcaagagtttctctttatgaagcatcaatatctaatatcctaaaaacagctggcattccaagaggcagtttttatcaatactttgaggataaggaagatgcgtttttttatttattaaatgaacatgcaaaagaacgtcatgaatgtttggtttcaaacttgaaaaagtttgaaggggatttgtttaaagcgattagtgaaatttttagatcgacacttgagcattctgaggataaagggcagagggattttatacgaaacgtattacttaacatgaactacaaaattgaaaacacgttttcgcaatatttatcagaagacgtagcaaatgagcgctatgatgacatttatgatcttgttaatgccgaacagctaaatgtatcaagcagaaaagaaatgtttcatgtgatgcaaattctaaccgcagttacctttcataatttgattcacagcgtttcgaacaacttatcggtctcagctgcaatgaagaaatatgagacggaacttaaattattgcaatcgggtcttatgcgatcgtcttcttaacgaacatcaagaaaacaaacagtgagaaagaagggagaacatgaacgacaatcaacaatcaggagaagggattggctcctttaacaaagtgccgcttttaatcgtccttttatccggggcttttgcagcgattttaaatcaaacgctacttgcaacagctctgcctcatattatggtcgatctcgatcttgaggcaagtacagctcagtggttaacgtcgatcttcatgctcgtcaatggcgtgatgattccgattacggcatttctaatagggaagttcaccacaagaacactctttttaaccgcgatggggttatttgccgtcggaacggcgatttgtgcggtggcaccgaattttccacttctcatggtcggacggattattcaggcttctggagcaggaattatcattcccctcatgcaaacgatcctctttttaatctttccagttgaaaaacgcggaacggccatggggatgtttggccttgtcatttcatttgcaccagcaatcggaccgacgttatccggttggctcgtcgaacaatatccgtggagaagtttgttttatgtgattcttcccattgtgattattgatttctttattgcttatttgattttgaaaaacgtaacagagcaaacgaatccgaagcttgatattttatcaatcgtcctttcttcactaggatttggcggtttgctgtacgggtttagtagtgcaggtacgaatggttgggcaagcgagcaggttattatttccatgcttattggcgcagttacgctatgttggttcattttacgtcagttaaaattaaaacagcccgtgcttcagtttagagtgtttcaatataagctcttcacgttaacaactgtcttaggtatggttgtgtttatcgcgatgatcggggcggcaactgtgcttcctttgcttatgcaaaatatgcttgggttcacagcgtttgaatcaggtttaatgcttttacctggtgctcttataatgggctttatgaaccctattactggacgaatttttgataagtttggagcaaagtggcttgcgatcattggactggttattgtaacggtgacgacatttatgtttacgaacttaacgcccgaaacaacgttcatttatcttgccgttgtgaatgcggtaagaatgtttggagttgccatggttatgatgccggttacaacagctggacttaatcagcttccagcgcatcttattccacatggaacggccatgaacaatacaatgcgtcaagtatctggtgcagttggaacagcgcttctcgtaaccgtcatgtctcaagcggcacagccatctcgtggtgtggaaggtcttgtccacggggtgaatgtctcctttattgttgcggggatttccgcgatcattgggctcgtgatggcattctttattaggaagccgaagtctattaaagaagattctgtccaggaaagtaaagtggcaactgaaaactgaaaattttcttttcattttcaacttgttcatgtatactaaatataatttaattgaattccttatctagagaggcagagggacaggccctatgaagcccggcaaccatcaagcattagtttgaacggtgccaattcctgcagacatacgtctgggagatgaggaagagtccgtttaaaactcttccttttattgtaaaagggaagagtttttttggattcaacaactgaatattttggaataaggtgctatgaccgtttgtcgtagcttaaaagggaagaccggtgagaaaccggcgcggtcccgccactgtaaaggagagcgacttactaaccactgtcattgatgggaaggggtaagaagcgttgaacctgagccaggatacctgccttatacctgcacatgtactctacgggttaatagaggaggtgatgacataaaccgtctgattgtttaattggtgtatggatcaatctctcttttcgtaagggagatttttttgttgacaaaaaaagagaggaagatggatatgacagtgagaagctcaaacttaggttacccacggattggggagaaacgtgaatggaaaaggctactcgaacgtttttggtctggtcaggtggaagaggacgttttccaggaacagatgaaggcgctacggctttcctatttaaaaaaacagcaacttaaagggattaacctcataccagtaaatgatttcaccttatatgatcatgttcttgatacggctgttatgttcggcattgttccagatcgttttgagcataagggaggagaggtttcgttacaaacttatttcgagatggcaagaggcaccgaagaatcgtcagccattgagatgacgaaatggtataacacaaattatcattatcttgtacccgaacttgaagcttgttctccctcccttgttcataaccgtcccctttcttcctatcgagaagcggtacaagagctagggattgaagggaaaccggtcatacttggccctataagctttgttttattatcaaaaggatatcgagagcatcagctttacgatgttattgatcaattccttccatgttatcaacaaattttacatgagttagataaggaaggtgtgaaatgggttcaaatggatgaaccgtcattaacaacaagtatttcaaaagatgtgcagaggaaagttacagaagtctatcacgcgttgaaaaaatcagcgccgaatctgaaaatcctgttgcaaacttactttgaaagcgtgacacactatgaggatgtcatcaatcttcctgtacagggaattggtcttgattttgtccatgatcgtggagagaactttaaggcggtaaccgaaaaaggctttccgaaagacaagttactcgctgctggagttattgatggccgtaatatttggcgtgctaatttaaaagagaagcgcaacttagtgaaaaaccttacatcattgatcaaaaaagaaaaacttattatccaaccctcttccagtttattgcacgttccagttactgtaaatagtgaggcggcactcccttcacttcttaaaaatgcactttcatttgcggatcagaagctagatgaagtcaccttcctgacaaatgctttacatcatgaagaaactatgaagaaagtgttcgaggagagtgatgacgtgattcagaagctgaatgaatcccctgagcgtaggaaggaaaaggttacgatcaatgttgatgacgtgaataatgttaaacgaaaagctgcatttaatagaagatacgagttacaaaaaaataagttagacttgccattccttcctacgacaacgattgggagtttcccacaaacaaaagagattcgtaaactgcgtcttgagtggcgaaaaggggaactcgatgaaaagtcttatcgacaatatattgagaaagaaattaaaaaatggatcgagattcaggaagagattggacttgacgtcctcgtccatggagaatttgagcgtacagatatggtggaatattttggtgaaaaattagaaggatttcaattcactaaatttggatgggtgcagtcatatggctcacggtgtgtgaaaccaccgattatctatggaaatgtatcatttcgaaagccaatgacggtaaaagaaacagtttatgcccagtcattaacaaatcatcctgtcaaaggcatgctaactggaccgattacaattgtaaattggtcatttgttcgagaggatcgacccaaagtagatatttgtaatcaagttgctctagcacttcggaaggaagtggaggctcttgaaggcaaccagattcgtatcatccaagtagatgagccggcattaagagaaggacttcctttaaaaaaagagcttcaacaacgctatcttgatgaggctgtctatgcatttaaacttaccacctcttcagtcgcaaatgaaacgcaaattcacacgcatatgtgttactcagaatttgaagaaattattcaggcgattaaggatctggatgctgatgttatatcgattgaaacctcaagaagtcatggtgaattgataaaagcttttgaagatagcacctatgataatggcattgggcttggagtatatgacatacatagccctcgcgttcctcatatagaagaaatgataggaaatattgagcggccccttcaagtactcaagtcgaatttattctggattaatcctgattgtgggctaaaaaccagaggacaggctgaaacgattgaagcgttaagtgtaatggtagaggcagcaaagcaaatacgaaaaaagcatcatattacggttaacaaataaaacgatttccttccttatacgctgattccactaaatattagtcagagggaatgttgaaaatgaactgcctttgctctcatgaagttgagcttcagaagtaaccgctactatctttatcgacgctgatgaaacgaaccctctgttcattcgtatagtgagataactataaaaaaggagcggtatttcatgaaaaaatcgaagaatgaaagcaagatgggagtagggatgggtcttggagtggcgatcggagcaggagtaggggttgcgctcgataacattgctgttggaattggtgttggaatcgcgctaggagtagcttatggtactagtataaataaaaagaaggattagcagaaaggcagctcaacctacaatgaggttgagctgcttgtttatttgttttggtctgcatacacggtcatagcatctctcataaaaagcgcgaggccttctccgtattgatcaatgttcttcgtaaagcgctcatcatcgatatacatttgaccaagcccttgaaacgcttcaagcgtataatggtacccaaagttcttattaagaaattcataccactcgtgaatggcattttgtgcttcttctgaatcgggtgatccgagtcttaaattggcaagctttctataaatcgtatggaacgactgaccgagcgcatctgtttcatttctagataagttcttaagcttttgtgttgatttgttaacggcttcgtctccaaacttttctcgagcttcttgttcatactggttttgagcaaagtctaagcctttaaatttctcttgatctgtcatagtccgttctcctttcacattctgaatcgtttggtcgatcgttgcaatgatcgtttccagacgctctttcttttcgaccagtcttcctttttgatagtgcagtgcttcaagttgattgaaatcagggcgttctaaaatatttttgattttcttaagtgggaaatcaagtgccttaaagaacaaaatttgctgtagcttttcaatatcatcgttcgtataaagacgatagccggtttctgtagttgctggcgctaagagtccaatttcgtcatagtaatgaagggttctgatggtaatgccagttaaattagcaacttctttaacctgcttcataacaacatttcctcctttcaaatttaactttagaggattacgtaacgtaagagtcaacataaaagataaacctctttagttttatttacaagattcccatcgttctcgatatctttccagcggaatgttattatttaggtaaatctagtaagttttcagaataacggctgacacacaatttttcccctttcgcgatatgacaagcacaaggaggagcatatgcaggaaaagtcaatggttttaagtgatggaagaagacttggctattggggttatggtgaccaaacagggataccaatcatgctttttcatggaacgccaggatcacgcatctggtttttagaagatgatgaactggcaaaagcaatgggcatttacttaatttcaatcgatagaccaggatacggactttcgacttttcaacataacagaacgattctagactgggctgttgatgttgaggagcttgcatcacatcttggtttaaaccgcttttctatcctgggtgtttctggagggggaccatttgctgcggcgtgcgcttttgctttacctgatcggattcatcataccgcacttgtttcttcagctacgccatttcgaaaggggaaagcgccaaaggaaatggcgaaagaaaatcgcattgccttttttctaacaaagtactttccatgggtgattaggaaagcgaaccttgctcaaaagaaaatgctagagaaaaatccagcgaaatacaagtcctccatgttaactgcaactcaccgtcatctctcagagtgggatcgcgaattgctaaaagaagaaccacttgtggaaacgagctactatcatgcaaaagaagcttatcggcaaggtgtagaaggtgtgatgtatgaaacgcagctcttatcaaaggactggggctttgagattagtgagattcgaagcccactaagaatctggcatggagataaagatacgctctcaccagtgagcgaaattcgtaagctggcagcacatgtttcatcattggaaattactgttgttgatgaaggaggtcattttttaactgaaaacgaagatctttgggctgatatgttacgatatttaaaagatagcagtaaaaaaatggtgtttacgtaaacgcttagacagtggagatgatgaattgaaaacagaaagagaaaaaatggtaagcggagagctttatcgtcccgacgatcaaatgctactggaggatcgccttcatgcacggcagataacaagattgtataatcaaacgattgaaacagatttagacgaaagaacgagattattaaagaccttttttggttcaacgaaacagaacgtgtacattgaacccacgtttaaatgtgattacggttataacattcatgtgggagagaactttttcgcgaatttcgactgcgtgtttctcgatatttgtgagattcgctttggcgacaattgtatgttagccccaggtgtacatatttatgccgccacgcatccgctcgatccaactgaacgtaattcaggtcaagaatatggaaagcctgttttgattggagacaacgtttggattggtggaggcgcgatcatcaatccaggtgtaacgatcggaaataatgccgttatcggttctggagcggtagttgttaaggatgtgccggcaaatgttgtggttggtgggaatcctgcaagagtacttaaacatatagagggctaaaccgcatttaagtgagaagcatgtctatttgtctagctacttttgacccattctcctatcgaaggaaagtttggcaaatcgtctgatgtaacgatgaaagcggtacattaaactggtatacttttgacaagaccgattcatgcagagaggggtgaacgagcagtggctgtacgagagcaattactagactatctggatcaaaacctggaaagctatcttattaaatggaaagcgaaaattcgaattgccgatacggatgttcaccgagataaagtagaggcgaatggcattcttatgtaccgtctagtgcagaaaaacattgaggagccgatcggtgaggaaaaaatcatatcgcttgctcataaagttgcggttgagcgagctgaagcaaacgtgaacattggcgattttatttacaatgtgaatgcagggcgaagcgttcttatgaagcatatgacctattcaaatgtccaagtgaatgacttgcaaacgatattagactcgattaatgaattatttgaccaattttcctaccatgctgtaacagaatatacgaagttaaaagaaaatgaacttcaggagaaaatttcttttattgatgaaacgcatcaagagaagctttccattcttggtcagatgtcttctagtttcgtacacgaatttagaaacccacttactgcaattatggggtttgtaaagctactacaaaaagaaaatccctcattaaattatattgatgtgatagaccatgaacttcagcagttaaattttcgtattgctcagtttcttcatgtttcgaagaaggaaatcgatagtggtcatgaagaatggttagaagtgaatgcgatcttcgagtcaattatagaattcatttatcctagcattgttgatatagacgtagagattcgaaataactttcctgaagggatttccatatttggacaacaggataagttaaggcaagtttttcttaatattctcatgaattctctagatgctttgaaggctgaagggtttccaagatgtattcacattcatggagagcgattgcatggaacgattcatattcatattacgaacaacggtcctaaaatcccaatggaaacattggatcgaatatttgaacctttttatacgacgaaagaacttggaactggaattggtttgtatgtttgtcagaagatcattcaaaatcatagcggcaaaattagctgtcaatcagatgaagacgaaacaacttttacgataagcttaccctatctagataaaagcgatatgtcgaatgaaacactttaaattgctttcctatcaataggacgattataatatgggcaagattcattcgacttattagctacggaagccctttttaggagaaaagggcttcaatttaaggggtgacaagtgatgattacaaaaaatgcaggtaagttaagtaaggcttattttaagtcttatatgcaactcgttatgagttcgcgagatttctctttagaaaaggcaagatcgtttgcgtttgaagagctttttcaaggtgatgaaatgaaaaacggtgaggaaacgtatcagaaatttacgcaagcctatgaagaactctcgcaagaaccgcgttagtctaggatgaaccattgaacagttgatgagagactccctgcagtctcttttttcattgctgtttcggttaaagagaggggcgttatcttgtttggatgggagtatgtgcctgattggtttccatggtttgctttagtagtggtcattttgtttatcgttttaagcgaatggtggattagaagatagaaaacaggccaggaatataatcctgacctgttttttcgtatgcatttttttgaaggtcttccagcgcttgtcgaacctaaacaggcgcttgcgcttttctgatctagctccagcgcccagatcctcgagacgcttcagactttcatccgaacacaaaggacgtgttcaaatgaaagtcctccagcgcttgtcggacctaaacgggcgcttgcgcttttctgtattaaagcattttatattcttcgtgtcttacgacgatgcgtttttcttcgtcttctgagtattcttcccattcagccacaatcgtattgttcaataagctaactactttagcttttcggttatcgatttcgactacactaccgatttcagggagaatgatttcctgttcttcctccatgcaaatccctcttttccatttaaactgatttatataataacataattcatttcttatgcctaacaatctgggaaatttggttcttacatttaaatcagaagataaaagtgtgcgtaattgcttgaattgcagcggaaagacagtttagattgtacactagccattttttcaagatcataatggtaacgtggtgtgcatatagtgaaacatagcctattctctcccccctccttgcgaggggatttttgtgtgttggaacagacttggaaaacaggtattttcgctctttcatgtcttataggcgaggtgtaaaataggagtagaaaatgaatacatattcaggaggttatcaaatgttccgtcaaatggaagattttgttcatgtttgggagcgcgaaacggcgcaaactggtaaactattgagttatttaacagatgagtctctttcacaaaaagttgccccagatcactttacgcttgaaaagttaggggtccacttatcacaggcgatcacgtttatgatgtctagtgctggacttgatctaactcctttagaagaacgggagtcatacaatgctcatgaaattaaagcgttatatgagcaaacggctgaaggtttcgtccgtgtgctacaagagcagtggaatgatgaaaaattatcagaatcaacaacgttttttggtagtgaaacaacttacggaagtattctgtatttattgctgcaacatcaaacacaccaccggggacaaatgacggttctgatgcgtcaagcaggtttaactgttcctggaatggtaggaccatctcgagaagaatgggctgctatgaaagggtaatgaatgcgggacagagggtttcttcaataaagaagaagctctctgtttatttgttagaagaaaaaagacaataaatctcttttcctcacatatactgcctgtgaaaagaggtggaaatgtggtggatgaaaagcaatcatgttctcttccgaactgtgcgcaaacaaacgatcaggctcctttatttcgagctgaagcctatgatccgtttgagaagaagattaaagaaatcgatcttgcggactataaaggaaaatgggtgatcttatttttctatacaagtgattttacctttgtgtgaccgacagaactagcagcggtcgctgctatttatccagagcttcaagctatgaattctgttgttctcggaattagtacagatagtgtgtatgcccataaagttttcaccgaggtttcaccagccgcctctaaagtgaactatcctcttgttagtgataggaatcatcggattagtcgagactaccgcgtgttaaatgaagaagcgggtgcaacgtatcgaggaacagttattataaatccagaaggcgtaattgtttcaaaaatgatgtatcctgtcgaggtgggaagaaacgcctttgaaattcttcgtctcatgcaagcacttcaatataataaaaaaacgggagaagcagtgccggcaaattgggtgccaggtcaaccaggaatcgttcgtcggtcaaagtatattggaagggtgtgagagcttcggaaccattccgctgctctttttttatgcctgtcaatgaaggaaaacatttcaatagcatgttagaaggtaggggagaaagggaagtataatactattgaaggttatgatgtaaaatacgtgaatataatgtgttttttaaatttataaagtacgttggatgttcaaaaagaagttgttagaaggaagggaagtttcacgatgaatccaacgaaacaagctaaaatattcgatacccatgcgaaaatatacgaaaaaagaagacaaaaaacgactatagatacgaagtggcgacacaagttattagctaaggcggatggagatatcctcgagctatctgcaggaacaggaacgaattttccaatctatcaaaacatttcctcgctcacagcagtcgattttagtatggaaatggttcggtatgctagggaggctgcaaaggaaacgaggtatccgtgtacggtgctccataatgatgtggaaaaactagagtttgaagaaaatacatttgatacggttgtatcaacgttgtctatgtgttcttacctacacccagcatatgtgctagagcaaatggcgaaatggtgtaaaccaggtgggcaagttttattgtttgagcatggcgtgagcacaaatccgttagtgggtaaattacagaagaaagtagatccttttttatcggaaaggattggctgtcatgtcgacagagatatgctggattatgttaagcattcaagtttgcacgtgagtagaattgaaagccacttatttggcatgtttcatcttatctttgcaacaaaacgcgaggtatagaaaaaggatgaatttatctaaacttgtcgaatgatgacttgttttggtaagcggttacgattggttcaggattgtgatttaatagaagaagtgacgagcggatattgaacgaaatagctaactaaagaaaatgcttcggatgaaaccttttccatatttaaaacgtttaaagaatgaacctttttgatagcaaaagttcgtcgcaaaaaaaattagagtaaacgtcttttgtaacacttagattactttttgttacactagtgttacaataggactgttaatctaaatgaaagtgtggctataaatatgtgtggttttgttggggtattacgtacagaaccaggaaaaacggatcatcacaatcatgctgatttcaagaaaagaaatcaaattattacgcatagaggtcccgatgatgagggctattatacagatgaatcaatttctcttggttttagaagattaagtattatcgaccttgaaagtggccatcagccttatcattatgaaaataagcgctattggatggtttttaatggtgaagtttataactatgttgaacttcgtgaacgattaaagaaagaaggctattcgttccaaacagagtcagacacagaagttgtgctaactctttttgttcataaaggagaaaaggcatttgcagaattaaggggaatgttttcaatcctcatctgggacaagcttgaaaagaagctagttggtgctcgtgatccttttggaattaagccgctttattacaagcaaacagaagaagaagttatttttgcttctgagaaaaaaagcattacgatgattgatcagttcgaagcagtgaatccggcagctcttcagcattatttaagttttcaatatgtgccagaaccgctgacgatgacggagggtattaaaaaagtcgaacccggtcattattttgtgaagaaacaacatgaaccaatcatattcaaacgttatttccacgcaactttcacaccaataacagcagaacgaaattgggtgaaggatattcaaaacgttctttatgattccgttaatatgcatatgcgcagtgatgttccagtaggttctttcttatcaggaggaattgactcatccattatcgtttccatggcaaagaaattcaatccgcaaattaaaacattttctgttggatttgagcgtgaaggatactctgaagttgacgttgccaaggaaacggctgataagcttgaggttcctaattactcttatatgatttctgctaaggaatatgtccaaaagcttcctaagattatgtggcatatggatgaccctctggcggatccagcatgtgtgcctctttatttcgttgcacgagaagcaagaaagcatgtgacggttgttttatcaggtgaaggtgctgatgagctttttggtggatataacatttatcgtgaacccgatgcgcttcgtcttttccaaccaatgcctggtgttatgaagaagatggtgaatcgtgttgcgaatgtgttgcctgagggagttcgaggaaaaagttttcttgagaggggttcaacaccactttctgagcgttatatcggaaacgctaagatgtttgaggaaaatgaaaaggaaaaactcctcaccacttactatcaaaatgagcattatcaaaagatcaccaaaccattttatcaaaatgtgaagcgagacaatccggttaatcagatgcaatacatcgacatacaaacgtggttaaggggagatatccttttaaaagcggataagatgacgatggcgaatgctcttgaattacgcgttccatttttagataaagaagtgtttagagtggcgcgggaaattccagttaatgaaaaaatagcagacggtacgacaaaatcgattctcaggaaagcagctcgtggcattgtgccggatcatgttcttgaccgaaagaaacttggtttcccagtaccgattcgacactggttacgaaatgaattatatgaatgggcaaagcagttgattcatgtaagtgaaacggattatttaattgataaaacgattgtgataaagcttcttcaagcacataaagctgaaaaaggagattattcacgaaaaatatggaccgtgctaatctttatgctctggcatcaaatttttgtagaaggcgtttattcgtttgaagaactgcaaaaagaagatgagattgtaagcaaagtagcaacgtatcggtaaaaaaaggtgacctttaaagggtcaccttttttcgttcatatcaaaaatcaggagtgcttttcttcaatttcaagaaggcgtttctcgattagtttataatcatcttgatgccctgtaaagacggcgaggtcatagagacgatttaacaagtaatcacggtcgagatggtatatgaactgttttggaatatggtccatcgaatttttagcgaaatcccaaacaacatcaagcttatctttactaatcgactgggcaaccatgctaagggcagcgataatttcagttatgattgggtaattgtctcctgcgtaatgccttaaatagccaaagcctcgatatacataataactaaaatcttctgcatccatgacaactcttacttgttgttcatgatcggcaagataaggggtaaatgtaatgtctcgctcgacttctagaaggagatcggccatttggtgaatgacggtaatggttgtttgagggtcgtcattccctaatgatttcaccccgatttcagcaagtttcgtcattcccatctttaaatcctgaatttcggtttctttatagcccagttcaatgtgccggcagtattgttctacgttcactcgctcggcaccagctccccagtaggaaaagaagcgattcccttttaatacgtaatcccccactttattatgaagtttaataatgatttgatctttttgagcttcatcaatcatcgccttaaaatcaataagctggatgtatcctgaatcgggagctgtaattagggtttcggtttctctttctttctccataagatcgcctgggtcttcacagcgaaattgttcaaggtcatttctgagtgtttctctcacaatcgagatcgattcttccttcatgtttgtggcgatattatgtacctgcatccaacttgttgcatggttgataaagaaaataaacgtaacaaccgtcacaaatgcgagaaaaacggtcgtgcctgggatggcaacgaaatattcatcttctttacttgtaataaataagaaaacgacaaggacataaacaaagcttccgtggaaaataccgataaagtgctgagtggttcgatcggctacgaaattaagtagcatgcgaggtgaaaactgtccgctaaatgttgtaagaacaacgagtaaggagttaagcgtaaaggcgcttagtgttaaaattccgccaataagggcacttatgagtagcctggtgggttgtgctgtcgttcggatcatgtttggcgtgtactgtgaaagttcgagaactaaatccaaatataaagtggcggctacaaaaacaaaggcacctaaaatatataagcctggcatataccagagcgttgcctgtagttcatgtttacggattcgccttgacatctcgaaatattttcgtaactgccatggtaatagttttttcatcatgactggggctcccttcaaattctttcattaacactttagaattaccctcagtgtgtggcgttaaaccgtgaaggtaaaaatgtattcttttttcttgtaaaataatgtggttaaccaattatgaaacgttaacttattaccgtccttattaactttgcataggatttgaaggtgggggaataattatttgatagagaattaatacgaaggtgataaacgtgatgttcgaaaaagcattactctggttattagtttttttaggaattggtttatttatttatagtcttcgaaagcccctactaaaagaatggcttctcttttttttacttacagggtatttttcttcgatcattggggtcattgttgtcgaagaagggatgctgacttatcctgtcaacttgtttaaccaacattttgactcaagccttacatacgaatatgttttatttccagtattgggcgtgtattattaccaatcgacatttcgttcaggatgggttggttattttggaaaggcagctatttattcggcgattattacaatcttggaattttttctcgaaaaatatacagatcttattcactatgaaagctggacatggatgtatacatttgtgagcaccatgttattgttggtgattatcagggtgattgtaaaatatttacctgatgtggaacagcagaggtaacgctacttatgcatgatttccacaaaaggaatgaatactatcttcagagtacattgaatggaggtaggcgaattgttacaaaaattaatctttatattaagtgtaacggtcctttttcttgtcccaattaccgttcatgcggaagctccttcttatgcaaagtgggggaaaacggctattgaggaaacgaccaaaaaatatccaggtcaaaaagtgactgactataggtatgatggaaaagtatttatctctgatgtaagagaacaatatgatttcgaatttacgttaaagcaaaacggtcagtcaagagagattcgcgtgtatgtgcttgttaaccctaaaaaagataagctgatcgatgtgaaatatgatgagatagaagaatttcaataagtcacgcttcaaaaagccagttatgatgactggctttttgctgttggcactgtaaaagaaggattttagcgtgttaaatcgaataatagtagctagagataaagagcgattttgcaaataaggagaggaagagcgtgaacattattaaacgtaaggctgatgtagaaactttgctaaagggtttcgatcaactagctgaatttgatcaggttggccaaaagcattatatggtttttgaagatactgaaagaaatggcctttgtactctcatgaaatatgagaactcatcgttttcagttcattgtaaaggtgcatcgtattgcgatgaagaggagcgttttttggaatctgaagaactaattgtttatttatggaagcgtcgaaaagcagttaatgcggtgcttcgtgattcaattaaggaaaaggttgaagcctagaacaaatgaattggggtttactctttgtgtaattgattccttataagattaagcaagagtactgaagagtttctgagattcgtgtagactgtaaagggtaacagaatgcagttaagaattgagggactcttgtgttaggtgtatttattgagattattgtgcccgtgtttattctaattgggattggcgtattgcttcatcgcatttttcaatttgatttatacacgcttgcaaaagtaaacatttatttcatcgtgcctggatttatttttctaaagctttacgaaacagctttttctttatcattatttctatccgtacttacgttttttagtattttaattgtggttttatactttgtatctaatttaatcagtcgattatttggctacagtcgaagcgtacgtgcttcgtttacaaacagtatactgttctataattcagggaactatggcgtccctgtaaatgatctcgtttttaaacaagatccctttgcgatgtcgattcaagtcattatcttaacgttccagaacattcttacgttctcgtgggggatttttgcattgaaaacggtcgaaggaagcaaggtaagtgcgcttcttggttattttaaaatgccggttttatatgcgatgttacttgggatcgggttcaatttactaaatgtcactgttcctgaatttgtcctcataccagcagattacattgcggattcgatgatcgcgatcgcgttattaacgcttggggctcaggttgctcaactacgtttatcgaagaatttatcagttgtgtatgtgagcttgatcatccgtcttttacttggtcctctcattgcgctcggcattatttttgtgttaggaatcgagggtgttacagctcaggccttgtttatttcatccgcgatgccaacagcagtgaatagtgcgatcattgcgcaagaatatgagaatgagcccgagctatctgcgcaaattgttcttgcctccaccgtattcagtatgattacggttacggcagttatttcccttggtcgtttgttattttaaaggaagaggcgctgaattggaaatcagaaccattgattttgtatggtggaaggtgtagagtataagcataagcaatacccatttcctgcaacgcacgttaacaacggttgtctcaaaccgatgctagttttccgggaactctacatccagttgctgataacaagccggccttctgagcgggacgttaaaggtagctgtgcgggtacccacctgcttttacgcgggctttgagacacttatagtgacgacggagcgggtttgggtttaaacttgcttatgtgattacatagagtgatgaacgttcatagatgaaaggcatggaagcaaattgcttccatgccttttttgatggattaatctgatattcgacacagttcgagcaaaagcgggcggtgacaggcactacccacctaagtgaagtactccaatttcgcatctgggaagaacttattgatgtaacctcctaatgtatctttcatatcctgctgctgatctttttgatagacgtacttgccgatgccgtattttccccatttgtacatccggtcttcttcttccatttcaagttttgtcatcggataatttttttgaatgacgcgtttcgccggctttgtgaaccggtgctgaatcagttcaaatgttaagtccttcgttgcactttttggaagcttctcctctagtttctcaaataaagttagatagccttgtttccaatcatcatacaagtaaataggggcaatgataaatccaagtggataaccagcttcagcgactttcgctgctgcttcgatccgttcatccagtcgcgatgtacccggttcaagaaacttaatgacataatcggcattcatactaaagcgaaagcgcgtccttccttgatggtctgcatcgagaaggtgatcaacgtgtgcgaactttgttacgaagcggaggcgtccgtaatctgattttccgaagtattcaatcgcgtgtttcaatgtatgtgttaaatgatcaatgccaacgatgtcagacgtacaggatgcttcaaaccgagttggttctggcgctctctcctgcatatatttctcggctgcatcgaatatgtcatccgtattcacgtacgttcggatatagggcttgcttcccattgttgtttgaagataacaataatgacagtggcccatacaaccagtcgcaaacggaatcgcatattcagcagaaggtttggaagtatcaaactttagcgtttttcttactccgacaacaagcgttgattttgcgacgcgatactgctggaaatgattatctcccggaaggttccttacttgattgtgtgaggtagtttccctaatttcaatatccattttagagaatttctcgtgcagttcccgtccaagtggatactctaacgctcttggttccatgtagacgagctgaggcacaaatggtttaaccaatgaaagacctcctattcgatcgatccaaaatatgtggcataggcctgttctgcttccgcttctgaatgataaatcgcaatctcagaatcaagtgggtagtaagtttcatataagaacaaggcaagcttaccaggttgatcaggatcgttcacaacagcagcttcctggatgttagcaacattgtaagtgtgtggattacgatacatgacgtaaacgacgtcacccgcttgatatccttgtcctgaatcattcgttgactcatataaattcatctcatcactcctttacgttctacttcctcattgttccacaagagtacggattcctttctggtaaataacgcctgttttgttttagtcatgaagcgcttaaagagcgcatacgatgttctgttgacttgattttaggggaggtgcgtgaaggggtgttaaaatggattaggatcttgttgccttcacaaagtgtgacagacaaaatatttgctcggttcaaactgtacaggaaattaagaggtggcacatggcaaaaggtatctgatcgtgtagctcctaagaaaagcgtttgggttagaaaggcggttaatgctgaggattattatgtatggaaaacagaggtccatgaataggttcggatttcaacgcaaatattattaaacaaattctcgacaagtattgacaaatagcgggtggtgtcaggcacccgctatttctatatgaaatgaataaatcaatggaaaagccctatactattttgtatatatatgtaaaaaattgtaatctagaaacggaagatcaatctctttaaccgttcggaagtaggagataagtaatgaacattggtatcgttattctgctagcgttacttgccttttggaaagctgattggaaaaattgggagaaatactacccaactatgctatatatcgcattagccgcatctgtatatgaaatcattgcttatgagaaatttcatttgtgggattttaaagagagtatcattctcaataaagtaatggttcattttatacacaatttagtcataaatcctctcgttgtcttgctctttttatcgaattatccatctagtggaagtgagattatctacaatgcaaaatgggttgtaggattctggattgttgaatgcttggtatcaactaccgatgcaattacttatcataatggatggaatttgggttggtccttattatttcttatcgttatgtttccaatggttcgtcttcatcaccttaacaaaagcctcgcactgcctttatctatcggaatttcactactccttttacttctatttgattacatatagtaaagcattcattggataagacatactagttggctaaacgaaagtggttaaaagataaactaatttaataaagacagtcaacaatatggtggtattgttgactgtcttttcctatgaatggaaaacgtctatacttggagatgtagtgaatgttagtaaaggagaacatccgatgcagttattcttatcaaataaaccatctgcttttattgaaaccatagtaattggattgctaggatcactgttgtttcatcttcttcatgcgcctcttccttggatgcttggtccgttaactggagtaacgatctggcattttagtacaggaagaacgctctattggcctactccattacgaaatatagctctacttttaattggttatatgcttggttcctctttcacgcagcgcacagttcatgaaataacgcaacatttcccctatattattgcagttacactatcaacagtttttggaagtttattactcggtcttataattgtaaaaaaaacaaacataaagctaatcgacggcttattcgggagcgtaccaggggggttatctcaagttgctattctaagtgaagagacaaaagaaatagacactggaacaattgtgtttatgcaaacaattcgcgtgatcctagtcatcttgttaatccctttccttacaatgtattttattaaaccagaagccccgatcaatagtccagctactgaagttggtaaagaagcagttgcttatccttccttgttcggtcttttgttgcttacgatgattggagcgtttttagggaagaaattgaagtttcccgctgcatttttaacaggcccattgcttatcatcgcactattttcggtaacagcagtggaagtacctgctcttcccccatttttcattttgatttctcagtactttctgggaatttaccttggtctgtatttgaaaaaagaaatgtcgagtaacattcggagaatcgggttttattctatttttactagtattctcttagtgtttttttcatttttactagcgattcttttaacaaaaataacgtctattaacctggcaacggcatttctcagtacggctccgggaggactagctgaaatgggcgttacggcaacaattgttgatgctgaccttgcgatgattagcggctatcaactttttcgaatcttttttattatgtttatcgcacttccattgctgcaatggtggatcagaagaaaggttcgattgaatcaataaaaattattctagccttatatggaaaatcaccggaagctgggacgtaaacagattctcatacatataaagaaaaataaacgcaattttaatgatcaacgtttgtaggataagcatcaaccagcatcattgaacatcattacaagaggaggattaaccaggatgaatgtttttcaaatgataagttttattaaagaacttgaacgattaaaggatacaacccggacggcatacatgagaagcggcagacgagagagtgtggcagaacattcctggcgcctcgcgatgtttgcttttgccttaagtgacgaatttcctgagctcgatcattttcgtgttttgtgtatgtgccttgtgcacgaccttggtgaagcgtatgacggggatatttctgcaacgattcaggtaaaccaacaagaaaagattcacaaagaggaggaagccgtgcaacgtctcacttcggttcttggtagaaatcagagtggagctattctttcgctttgtcaggagtataatcgtggcgaaacgaaagagtctcagtttgtaaaagctctagataaaatggagacgattattcaacatactcagggaacgaacccaccagggtttgattatgagtttaatcttacttatgggaaagagtatgcagaatatgatgaaatgataaagttactacgtgatgaaattgataaagaaacattaaaaaaaatgagtgaaaatgcttaagtaatgattcgtaaaaggtaaggtgtaagcaggtgaaaattagattaattcgacatggaaaatcctcatgcgatttttcaaagcgtttaacgagtcaggattatcgagaatgggtgataaaatacggagaagaaggaatctgcgatgaagcacctgaaaacgtacaacgggcattaaaggagacttctgtcgtatttacgagtgatttcaagcgttccatcgactctgcacaatcagcggttgcgatccaaaccgattcaatctatcgggaactcgaactcccttatttccatgttaagttgctcaagctaaagcctcgcatatggacagttttttatcgattgctctggctgattggattctccaagaaggtagaaaacaaagaactagcaaagaagcgggcgaaaacggccgctcaacgattagaagaaagcgcactaaaacatggtactgtcattctagtcggacatggattttttaaccgctatatcggaaatgttttaacaaaacgtggctggatattagaaaggaacaaaggcacagcaaactggacaatccatacgtataccaaatgaagttctcagattcagacaaagggctgttactttcgaaaaaaataatcacgtggtttttgtttaattcttattatgctgaaatatttttaggtgtgcgccgaaaagcaaagtcatttaatagaggccctacatcaagatggtttcgtatgaaatcattcttagatgagagcggttacgtgatttttattttcagttaagtaaagtcacttattaagaatgaggtataggaggaagtttgcttttattgaaaagagattcaggaaagcagaccttagaaaggacgtcgaagttatctcggcaaaacataaaggaagaagctggggatcatttagctgatcgcttgtaaattaaggggttgtcaaaaataaaaaagtaggtaaaatggacgcaaggttaaagaaatgcagtgtttggcatcatagaaaaacatgccaaacatatcatggaagtatagaaaacaaactgttccacagaggaaccattacatgcttagaaaggggaaaaaatcatgaatcgttcagtggtctgtccatgtgagggtgttattgagaagatctttgttcatcattcagcccgcgtttatgagtgggagccaatgtttgtcatccgaaacggacagggcaataccgagaaaattacgcttggagtaagcggagaaatttctgaacttcatgtgaaagagaatgatcgtgtaacaggtggatacattcttgcatcaatgaaagaagatgactttgtaacaggaagcgattaatgatcggtctttaccgagcacatttataaataagattgacacgaactggtgcaagcgtgttacgggctaccgtagtgcttgtgcctcttttattttgtgagttaaacatttctcgctttttgtttacaaaagtttcttgtcagattctaacgaatatgtcttgcaggatccattaatttttagtaaagtacacatatattacacccgagatggacaaatgtttttgtatggaggacactatgaagaaaattggactattgccacgtattcttattgctattgcccttggaatcgttattggagcttatcttcctgaaacggtcgtacgtattttcgcaacatttaacgggattttcggaaactttcttggtttcgcgattccattaatcattattggctttattgcacctggaataggtgagatcgggaaaggcgcgggaaagttgatcgggatcacaactacggttgcctatctttctacttttttagctggcttgctcgccttctttgcggcacgaaatctttatcccctctttcttgaaacgggcggagctgcatcagaaatggcaaaccctgaagagtcattgttaaaaccttttttcgaagttgaaattccacctattatgggtgtgatgacagcgctcgtactggcgtttacactaggactcggaatggctgccatgaagggaaagatgttaaaaggcgttatggttgaatttcgaaccatcattgagaaagtgattcgttttgtcatcattccattattaccgcttcatattcttggtatttttgctaacatgactagtgctggacaagttcagacgatcttaagcgtatttgcaaaagtgttcgttatgatcatactccttcacctgacaatgcttttaatccaatatagcgtaacaggtgctgcaacgtcacggaatccgttaaaacttcttaaagggatgatgccagcctactttacagcgcttggtactcagtcttctgcatctacaattcctgtaacgttaaggcaaacgaaaaagaacggtgtacgtgagaaaatagctgacttcagcgttccgcttcttgcgacaattcacctttcaggaagtacaattacaatcgtttcttgtgcgatggcagtgatgctgttgaatggacaagatccgacgtttgcatcaattattccatttatccttatgctaggggtaacgatgattgctgccccaggcgtaccgggcggtgctgtgatggctgcgattggattgcttgagacaatgcttggatttgatccaacaatggtttcgcttatgatcgcgttgtatcttgcacaggatagcttcggtacagcttgtaatgtgacaggtgatggtgctctgtcaggcctcgttgatcgattaacgagagagaaagcaccagtaaaaagtacggttaaagctggataaagaactggacaggcactcgcctgtcctttttatatgcatagcgttcgcctctttattcttcaatggaaaaagggtttcacacgcttattcccgaatagattggagttgaggaggagagatcgatgaataacataattttaaaccagaacaaacaaagctggaacaaagtagcgcatcattttaatggaattgatgcgctacctcattatggtccttatgcacaaacagaggacgagctccatttatttgatgaagtggcaaattcgaaagtactggagattggctatggtagtggccattcacttcggtatatggctaaaagaggggcttctgaaatttggggaattgatttgtctgaagaacaaagaagaacggcagaaagtacgctagccggtttatcagctaagttattttgtgcgccgatggaacaagagatcgatttaccaaaaaactattttgatcacgttttttcgatctatgcgattggatggacaacggatttaactcgtacgtttgagctggtttattcctatttaaaaaagggaggaaactttatttttagctgggatcatcctctttatttgcatgtatcgagtgaaaatggtgagatgtcgttgaacggttcttaccagcaggaaggcctacatacgtttgaagattttaaaggggaaggcgtacggatgacaattcataagcgcaaaatggcaacgtatatcaatacgttgatcaaagctggttttacaattcaagaggtcattgaaagtgatgtttcagttcggtatgaaggagaagaggaggctatctctgaccgttattattctcttcataaagcgagaaagtttccaactacgatgattatcaaggcagtgaaataatgaatcataattcaaggctattattttagttttttagtttggtgtttgtcttttagacctattttagcgtaaaagtgttgaataattttaaattgtaataggagttgatcattattgaaatattcactctgcattggagcctacccaggtgaggatgtgatcactcacctagaaaaagtgaaggatcatggatttcatgggctagaatactatgattggacggaattaaatctggagcgagtggctaaggcccagagtcgaattggtgttggaattacagcaacttgtacgcgtttttttaatttagttaattcaaaactacgagaatcgtatcttcaaggattatcagaaacgattgaagcatgtaaaaaacttggaacgtcgtcgattattacccaaacgggaaacgtgatgatcgatacccctattagcatacagcaagaagcaatggttgaaacgcttaaaagaagtgcggaactatgtgaaaaggctgatgttgtacttgaagttgaaccgctaaatgggcttgtcgatcatgaaggtcattttctacaatattcagatcaggcggtgtcgattgtcgatcaagttgatagtccgcatgtaaaactattatttgacgtgtatcatcagcaaattacggaaggaaatgttattcgaaacgcaacaacttattgtaaccgaataaatcactatcatattgctgataatccaggacgtcatgagccaggtacaggtgaattaaattatgggaacatcttaaaagcgattaagaagacaggctttgaaggatttattggactcgagtgcgactacacaattccaacagatcaagctttagattcgtttaagaagacaattttacaatatgttgaataggctgaaggcgcgggtagaagcatttctagtggcagggtaaggcaaacagctagacgaatcataaagaaccttttaagatgggggtaatgaaaggtaaaggagtttccatatgaattttgtggcgttagattttgaaacagcaaattcttcacgaggaagcgtttgctcgattggtcttgttgaatatgaagatggtcaactgattcgagaatattatcgtttagtgaaaccgaaacaaaatgttttttctggcattaatattagcattcatgggattacagaagaagatgtcgaagatgcacctgagtttgatgttctgtggcgagaggaaattcgtgagttagtcgaagggaaattcctcattgcccataatgcgcaatttgatatgagcgttctacgtgctgttcttgatcaatatgatcttccatatccaatgcttgcgtacaactgcactgtaaatctatcaaagaagacatgggcgttacctaagtataaattaaatgttgtctccgattatcttgggatccaactcgaccatcaccatgcgctagatgatgcaagagcttctgctcagattttcttaaaagtggctgaaacgttagatacggcagatatcaatgaacttatcgaaagaactggtacagccaacggcattatatttgatagtggctatgaacctgctaaattaaataagaaaaactcaagaaagacaaagaaaacccctgcgccacgttgaatagcgaggggttttcgtgcatctcattaaaagaaatgaatgaggaaagagagtgtatccagttcacgtgctaaatcaatttgttgaaggtgaacgttagctgggagcttaaggtaggcagatgaaaaattcataataccaagtatcccggtttcagatagcttttcagaaaccatttgcgctgaagcggcgggaatagccaggatcgctactgttacactagcggttaaacgttcattcatttcatcgatatgatagaccggtacacctgcaatggttttgccgacaacttttgggttattatcaaacgccattttaattttaggagacgattttcgtaagtgattatagtgaagaagcgctgtgcccagtcggcctgctccaattaaagttgcttcaggctcagtattctcgtttacaatcaggtgaaggtgattcacaagttttttaacttcgtacgctgccccttttcgacctggggcttttatcttagaaaaatctctcctcacaagatctgatttaaaattaagcgcatgaccaatctcaacagaggagatcgatttttgacctgatttctttacgctctttaaataagaaagatagagagggagacgctttatggttgcatttggaagttttttttcttcctttttcatacgattacctccgtcaaactatatccgctttcttctctattataatcttaatctagcaaagtgcaatttggaaaataatccaaaagaactagtgaggagataggatttcgtaaaatcctcaaacgatggaattcatatttagcaaacagaaaaagaaccggtcatttagccggttctttcaaacggttattgatttaattcttttttacataaataccaatcaatacattcaagaccttcaagaccttcttcgttttcccgctttttcatatcttcctgtgttttaggaggagaaacaagtactttatctcctggttcccaattggccggtgttggagcaccgtgctgatccgttgttttcaatgcctttactaatctcataatttcattcatgttgcgaccggtcgtaagaggataataaatgacagcacggacaacttgtttatcatcaactacgaatacagcacgactcgtttccgtttgactttcttccggcatgatcatgccgtagcgtgtcgccacttttcgatcgagatcggcaataaccgggaattcaatttcggtatcaaaatttttctcaatgtttcgaacccatgctaaatgtgaggaaacgctatcgacactaaggccgattaactcaacatcgagctttcgtaactcaggataaatttcctgaaaagcaacaaattccgtcgtacatactggtgtgaagtcagccggatgcgaaaacaaaacaaaccattttcctttgtaatcatcgagtgaaagttgaccgtgtgtcgtgttggcagtaaagtcaggggccggtgacccgattcgtggtagctgataagctgtttctgcttgttgttctgacataatgaaacgtcctccttctattcggatctatgattggttttccctcctattttttaaataaactgtcttttttgtaacgaatattgtcgagataacttatggaaaagaaagaaaatgataaaatgaaagagaggaaaagaattccaaaggtaggagagaggagaaatcgtatgcaaatcgaatttcttggtaccggtggggccatggcgatcccccggccactatgtcagtgtgcagtttgcgtagaagcgagaaagaaaggcgtcccttatagtcgatctgggcccagtgtttttgttcatggtcctgacgtattaattgatacgcctgaagatagctatatgcagttaaatcgctcgcagatttcgaggatagaaggcgtgttttattcgcattggcaccccgatcatgtaatggggaggcgggtgctcgaatcagtgaatgcggattgggtgaatcaccctccacaaggaacgacgacggacgtctatttacctaagcaagtagccgttgatttccaaacaaggttaggtagtggtgaacatcttgctttttttgatcaacaaaaatacatagcgcttcataagctgaacgatggggagaaagtaaccattaatggggtgtcaattacgccgtttcgcttatctgaggattatgtttatgcgttcctgtttgaaggggaaggcaaacggatattgattgcaccagatgaactttatggatgggagccaccggcgcttggtgaattggatcttgcgattttaccgatgggtgtttgtgaatttcaccctttaacaggagagcgacaaatcagtaaagatcatcctgtcctgaaggaagaagctacatttcgtcaaacgcttgaaatcattaaaaagctgcaggtgaaagaagtgtatttaacgcatcttgaagaatcagatcagctgacttatgacgacctaaaaaaggtggaaagtatgcttcaaccaattggaaagatttcgtttgcattcgatacgttaatgattgacctctcacaaagtgcagtttaaaaaatcatactttagggaaacatttttttagataagaaacgaggtgagcgtatggaactgtcatttgggcttattcttaatattgtaatagcaatttatttatttgtggatgcaaaaaaacgagataaaagctcttttttctgggcgattttcgggttgatttttggaccaatcgttctagggatctactttattcaaacaggtagaaaaggcattggttggcttatcatcattcttgcccttatttggtttattattgccattgtgttaggtatattggcagggatcattggactattattttaagaagaaacctgaagcatacgcttcaggtttttttattgggtttaagacttgacggaatgtggaagagtattaagataccattaaaacaaatgagcgcttgaggtgaatgtgtcatatcgacgaaagagggactcttacattcatagataagtaatgactcaagggggaagcaatggatgaggaagcaaaagtgatggattggatcacttccgaagtcgaagtagaatcatgcaccatgcaagattatccggtataccattcgggtaaacgagtcatcgatcgaagcggagattatcttattgtctactttcatccgttgcttgaaaaagttgtttatacgtttaaagggattgaagattgtttttttattgctcatcgttaagcaattttgaataagataaattggatagataaaaaaatggagcgcagctgcgctccattttggtgtttatgggacaaggtggatatgtttttcaatctcttctgatgtaataagcgaaagttgatttaaaagcgcaatttgaaagtcgcctggccgattttcaatatgatcggcagctttttcgcttgcaacaccataaaacgcaagtacgccgtatgcagctagcatcggatctgactcaacagctgcaaacgcaccgagaagagaggagagaaggcagccagtaccggttaccttcgttaagatcgggtggccgttaccaagtttaagtgttgtttcgccatctgaaacaatgtcaatcgcccctgtgacgatgaccgtacaaccaaacatttttgcggcttttcttgctagcgtttcgctatttccttctccttctgtcgcatcaacgcctttaattgaccactttttacctgcaatatttgcaatttccgctgcgtttcctcttagaaattgcacatccacttctttaagaatatgacgagctgttgatgttcgatacggagtggcccctgctccgaccgggtcgagaataacgggaatgttcatttcattcgccgcttttccagcgatgaccatcgcctccaccagttcttttgttaacgtaccgatatttaaaacaagagctccagaaatcttggccatatcagcgacttcttctttcgcataagccataacagggcttgctcctgcagcgagtaagccgttcgctgtaaaattggtaacgacggtattcgttatattatgaatgagaggagatgcctctcttacttttgtaatgaggtgagctgcgtgagatttttccacggtcaacatcctttcttgcttgttatttctattggtttcttccttattttttcattgtaacaataaggcgtgttcgtgaaaataaaaaaggaaaggagttccctttccttctttaaggtcttgagtaccgattccacaaacgtaagatccatgaaaacggaaaaggtaatcggtacccagttttttcaagttgttttagaaggtttataaatgcaccgccaacgcggcgctgctgttttaatacttcctcattcgctttcactgtaatgcgatagccatcttgaagtccctccactttcacttcttttgtaccaagcttttcggtagtttcttttatcactttcggatcttccatctttatttctcctttttaaaccagagtcgtttttccatagcactaacagtaaagatggtgagtagagcaatgcagccggatataacagtaggaaggaatagggactgaatctcaaaagctagacttacaaaaaaaccaatgaaacttaacgaaaagagaataaaggcatagtgtttattccataacatactttttgatcgaatttccgttttcttcaggttttcttcccattggcgatggttgttgaattcatccgaaagtcgatctagtggattttcaattgaagaaattcttgcatagacctgcttcaaaagttttttaggatcatagcgatgatcagccgattcctcgcgattgatccactcctgcacaattggtttgccttcttcaattagatcaatttcgggatccaaagtgtaaaggattcctacaatggttgaaatggctctccctagaaaagcgaactcactcggtaactgaatgggctgcttgtttacgagcgtttgtacttcctttaaaacttgttcagcggtatcttcatccatcatcgttaagtcctgttcaatgaacaaggtgactagcgtctgtatggctttctcaatctgtcttttatcagagttaggaagaaggaagcgcaattcgtctagagcctctgttacatcgctgtactgactaagcacgatcccggtaatcagctttcgaatggaaagggcatcctttgcttcaatatgtccgaccatgccaaaatcgatgaaaacgatcgtgccgtcttcttgaataagaagattaccagagtgaggatcggcgtgaaattgtccttcttgaagaagttgttcaagatacccctttaaaagcttgcgagctagctctcgtcgatcaatcgctttctcgtcaatataagaaaggtttgttatacgagcgccttccatccattccatgacgagcacttttttcgttgaccattcagggacgtaatttggtacccgatagcctggactatcgctgtagcgatccttaaagtgaaggccatttttcaattctttcttaaaatcaagctcatcttcaatcacatgacgaacttcctcgtacagcctgcttaaatcaagttgcttcccgtatgacgtaaacttatccatgagccagaacacgatgcaaagggcttgaaagtcagcccgtataatcttgcggatgtttgggcgacgtattttaattgccacatcttcacctgaatttaacgttgctctgtacacttgtcctatggaagccgatgcaatcggacgatctgaaaggttgtcaattacatcttgatagttcgctgcccattcttcttcaagaatttgtttcgctttttcccaggaaaaagaagggacgcggtcaaagagatcttcaatttcttctagaaaaacttttggaagtatatccgctcttgttgagaggaattgcccaagcttaacgagcaatccttcaagccgaattgcttttcccttgtactcttttgcttgcttttttaatagtttctgccagcgttcctgatcccacgagtgcttactttttcttcgaaagcgttcaagttgaaggaagaacttaacggacatccaaacgatcacactaatccgatacagcgattgatatttcatagacgactcctactcctgaataagttgtttagtgtttaacatagcctatttccgcctattagaaacaattattacgagtaaggagcacatcaaaaacccctatcctaactagcgataggggttgcgtttggaatgcataaattaaaccggtgcattcacttctaggtcttcaatttctttctcctggtattgcacatcttttctagcattaaagcgatccgctttttcaactgttaccgtaatgttgtagtcgggaataccggcatatttctcatatcttcctcgaggtaagaggaagtttccttcaggaaagtgtacttctagatttccacttgcgatatctacaaatttagctcttccttgaaagacaccgaatccattgtaaacgacaattccttccccttcagtgatgcttagtctgcttgcatcttctgcattcataagcacgtcgtatcgctctgcttgattgaacgggtccgtttctttataaaccatggaattaaattgtttccctcgtcgtgaggtaacgataaattgtccttcctttttacccagatcgggtatttcaacagaaacaaggtttcctttaccatcggacgtctggcatattccatcttcacataaccatgcgccaccccattggaatacatcgcctttcttagataggtgttgaacaccgtcataatccgggtttgcgatggcgatttcatcacgaatctcctgacctgttgtgaaatcaacaaggtgtgccgtctctggtttgattcgtttcgcaaggtcgatgtagatcttccattccgatcgagcttcttctacctgattttgatttccttctatttctggcgaaaaataaaccattcgctcggttgaagtggaggtaccgccaccttcttgttcatatctcgttcgagcgggtagcacgataactgcttctttagcatcgactagagtagaggtgttaaggataatatcctgatgaacgcggatatctaactcagacagggctttttcaataaaatcaggatcaggcatcgtttcaaggaaatttcctcctgataagtagtaaagtttaatctttcgttcgtgatcttctggaaggataatgttttctaaggtcaccccaacgatatcaccctgccatttcggtagctcgaatccccatacttgttccatgcgacgaatgttgttggcgtcaaatccacctccaggtaaaacaaacggatcggctcccatttctcccgagccctgcacagacgagtgtccacggaaaggcattaagccactattttttttgccaagaaaaccacgaagtagagcaaggttagcgacttgggaaatgttgtctgtagcgaaggaatgcatggttaacccaagtgcccatgcgaaaacggcgctttgacttttggcgagaagaagagagagttcgatgatgcgttcttttgctatgccagaagagcggacgatctcctcccatgattggagttgaacgtttgcttttaactcttcatacccatttacatgctctcgaacaaatgagtgattaatcgctgagccatgcttctcttcttccatgtcaaaccagtgcttcataatgccgtgcatgaaggcgatatctcctccaacgtttacttgatagaagtcgtccgctaatttggttccaaatagagcggattcaccgttggaagggatccaatatttgtccatggctggctctttgtacggattgaccataatgattttcgttcctctttttttcgcttcaagcatgtactttgtggagacaggtgaactatttgaggcaacgcttccccagaacattaaaacgtccgttccaaaccaatcttgataattcactgttgacgcacctacaccgattgaacgttttaaagcggttttactcggtgagtggcaaatacgtgacgcgttgtcaatatggttagtgcctagaaatcgagccactttcgatgcgacgtaataagactcgtttgtaattcctcttgaggttaagtaaaaggcgtactgttttggatcaagctttttcatcttttgtgcgataagctccattgcttcctcccaagtaagacgagagaagtggttttctccttttcggcgaattaatgggtaagggatccgtcctaatttgcgaagttccgtactgctgtattgacgaagctctttaatatcagaatgaagcacgtcctgatcgattgctggcatcgtgtttagtcttagtacgttaagtcgtgttgtgcaaacgtgaggaccttttaatgtttgatcatataatcctgaaacacctaaagcacagccatcacaaacgccctgtgttaaaattctcgttgcatagctgatattatcacgattttcccatgcgatttttgcagtgtctcgaaagtgctgaggttttacttttcctaatccaaaggggatgggacttacccaatgtttaggctgtggtttctttgttgctttgattggtccttgatgttttgttttacccatttgtgtttcactcctctaattcattcactacaaataaaaaaccactgcttgcccgtcgcttgtgacggaaaagcagtggttgagtctttagcagggtcgctaccaagtgcctaaccagaggttatttatttgatttttgttaagaacttttcattttttcttctatgttttgatcaaatacaaagattgacatcccaaaatcacgatcaatatcgatatcgacgaagagatcaagaaatttactgtctagaaattcttccatctgtaccggaggattgttgcgatacatttccttcaccatttcagttctagcagctctaagcatttgtttgccgtcatctgcgctagcaataaatttttctacaggtgaaaggtttccttccatttcacaaattgcccagtttttgcaaaacgttgtcgtgatcttactcggtcctttgcccatgtgtttcttacgaaaagagcgaacaaggttgctgaattctgcttcatacttattcatactgtcctactttcttatcgagatgatcttatccattctttactacatgatcataactatctaaagaatttacatatttacagccgtaggggcttcattttctttacgcagcttacgaatatcttttcgaataacgattgaaataatgagggcgacaacaaacatgcccgcaaagaaagttaaacttgcagcgtaacttccagttgtatccttcatccatgcagcaaacataggtccaacaagtcctgctgcggcccaggctgttagaatgtacccgtgaatcgcaccgagctgttttgtgccaaacatgtcaccaatataagctggaatggaggcaaaccctccgccatagcatgtatacacgattgctagcatgatttgaaacaagatcgctgttgttgtatgtggaagaagagcaaacaagccaatttgcagaacaaagaacgtagtatacgtatttggacgtccgatgtaatcggaaacggatgcccaaccgattcgcccaagaccattgaaaattccaaggacaccaacgagtgctgccgcttccgtagtcgtcaatccgatactttcttgcgcaagcggttttgcagcagacaaaatggcaattccgcatgttacattaataaacagcatgagccataagtaataaaatcgtgacgttttaatcgcttcgttggctgttaactgggatagatcaccggattttttcgaatgtttttgtttttctttaaatcctttaggagcccagccttcaggaggcttttctaaatataaagaagaggcgaccatgataatgaaataacttgctccgagtatgtaaaaagtattggcggttccaactgatttaattaacgtatccataacaggacttgcgatcgctgctgcaaatccaaaacccattatggcaaggccagttgcaagaccgcgtcggtcgggaaaccactttactagcgttgagacgggagcgatatacccaaccccaagtccaatccctccaagtgctccatagaatatgtagagaagaggaagagagccgagatttacagcgaacccagaaccgaagataccaattccaaaaaaactagctgcaagaaggcctgctttccttgggccatatttttctacaaaatgaccgagaaatgctgcggataaacctaaaaataatatagcgagactaaatgtaaactgtacttgtttagctgaccagccaaattcgtttataagtgggtcggtgaagttactccaggcataaacggaaccgatcgaaatatgaatccctactgcagatgctgcaattagccacctatttttaaccttttccatccactacatctcctttagttcgttaacaagctaactagaaaaaacaaaataaaaaactgtcgatcgaccaaataagagaatgagcattctcttgtaggtgattgacagttagtagttagcagggaacgctactatcaaaaccaacagttaatcgctttcacttttgttgtaaccatcaaaaccgatgacaggttcgctacctcgtgtctttaattgttacaacatcatgaacttttataaataatagcataaaattttacaagcaatcaataaattattgcagtttagtagaatcgagtgaatcattttgatcgattcttaagcttcttttgaatgaaaaaagcaaggacagcagaggttgccagtacaatgacggttactaaaaaagaattttccgcacttgtataattgcccgcgctagagtaggaggattggttatggaaaacggtgaaaaaaattcctgataagagctgtagacaaaaaaataacacgataaaactgctaacgaaagagagataattcttcatctgttttgttcctttccatgatcaataaggctcgctaaaagcgacttcttaataattattcgcgtttcgtatcaattactaggggagaaaaaagccgtaagtatgatttggatttacttttatcaccacgagtggaaatttccattaatattgaacaatatgatcacatcagaactgtttcaccttccaaaaagaggggaatggtagaaacagactttgcaatttctgtttagggaggacaaaatcgtgaaacgtgctatgctcattataaatccatcgtctggtaaagaaaaagcaatgaattacgaagaagaagcagtaaacattttacaacaaaatcatgtggacgttacagtgaaatatactgaaaaagaaggggatgctgtccgttttgctaaaaccgcatgcgagaatcactttaacacgcttgtcgcaatggggggagacggaacgattaatgaagcaattaacggattagcaagtcagtcagagcgtcctaattttggcttcattcctttagggacggttaatgatttcgctagagcgcttggcatcccaatgcaaccgaaaaaggcgctgaaagtactagcacaacagcatacaaaaccggtcgatatcgggcgaatcaataatcagtactttatgaatgtgcttgctgtaggagccattgcagaagcagtatacgatgtgacgcctgagcaaaaatccaaatttggtccgcttgcttatttaattgaagctggaagagcgctaaaagataaaacaccatttgacctgaaagtgacgtatgatgggaaacaatggaatggagaagcttacatcatgctgattgcattaacgaattcagtaggagggatccagtctttcgcccagcatgccgaagtaaatgatgggtattttcacatctttattttaagagaattttctcttccaaaagtatttaaaattatcccagatctctttagtggaaatatacaagacaacgctcaagtggaatatttccctgcctctaaactaaaagtagagtcagatcatgagcttgtcgtcaatattgatggggatgaaggtgtccatcttccatttgaagcagaagtgatgcacaatgaattacatatttttgttcctgaagagtagtgcgcctactcttttttacatgttgagtgggtataataattatcgcatcttccaaaaacgacctgcttcttattcccatgcttcatgaatatgctagttgtgatgaaaactgggatgaggtggaaagtatgggacaaaaagttcttttttttggagatgttggaattgatgacacgattgctctgttatttgcttatttttcagaaggtgtagaggtgattggcattgtagcctgttacggtaatgtatccaaaaagcaaacaacgcggaatgtgcgctacttacttaaagaagttggccgaacagatgtcccagtgatgggaggcgcggaaaagccaatgacaggtgaggtaccaacgtattatccgaatgttcacggtccagaaggtttaggtccgattactccaccaccaaatgaagctgagccattagaaaacttctttgacgttatccctcttattgaaaaatatggtgaagatctggttattgtaaacgtgggcagaatgacttcgcttgcaacgttattacttctctatccagatacgatgaaaatgattaaatctttctatattatgggtggtgcatttaatgtgccagggaacgtcactccgagtgcagaagcgaatttctatgcggatcccgttgcagccaatatcgtcatgaagtatgcagaaaatgttttcttatttccactaaacgtaacccagcaggctattgtaacaccgggaatggtaaattatatagaagcaaaaagtaagccaccttttcttaagccgcttctagattattattacgaggaattttatcaaaagatgattccgggtattgaaggaagtccggttcacgatgcactcactttaatgagtgttgaaaataacagcatctgtactttttaccgtacgccagttgcagtagaaataactggagaggcgcgaggtcttagcatcggtgattttagaaaatccttcgaacaagcagaatttgataaaaggccagctcaccatgtggcgatcgaactgaattattttatgttttataaattatttatggaaaccatgacgggagagacaatttagaaaatgaaaccttttcttgtcatttttcgtaaagagagtaaaatcgataagaaaccgcttttttttagctacctagtgacaaatcgattttgattaagtatagaggttggttccccttatacaagacatctgttgcgaatagattaaaatatagaagcgtaacaaatgtaagaagtgaagagggtgcttgtgcttgaacgacattgagagaatgatgattaatatcagaatagaagggacaagtgttcttcagaaaccagatgacttaacaatcattggtagaggaagaagtgcagtagtttttaagatccctggtaagcaaaaagttcttaaagttttttaccctgaatttgttcatcttgcaagactagaagcatcgatttatcaagaactgcacaataatgattactacccttccttctatgaaggaggagaggggtatgtcgtattagaatatttagaaggactgaccttttacgaatgtttaattcaagggatcgtgattacagaggaaatgattgagaaagttgatcatgctcttaactacgcgcgtaagaaagggctaaatccatcagatacacatcttcagaacgttatgcttttatcgaatggggaagtgcgcgtcatcgatgtcgttcgctttcgtcaaagcaaggtatgtacacactgggaagatcttaaggtagcctatgatcgcctttattcatctcgtttctttccgaaaaaatatccagtgtggttcgtggagatgattattcgcctttatcgtaaaggctttattcgattgaaaaaaaggaagtgaagacacagtgcaacaatctcggttattccgattctttatttggcttcttcttatttttacagtaatttgggttggcagtaaaattgaatttatttttcgtccccttgtcatcttagtgacaacattagcgtttccaattattgcagcaggagtgttttattacattctacgacctgttattgctcttttagaaaaatggaaaattccaaggccacttggtatccttctcgtttatcttgcgctagctggtggggtaacgggacttgttattagtattggccctgtacttgttgagcaatttaatagtcttgtgaagggtgccccgacgcttgtgaatgatttgcagtccgcgattaacgactggcagaggaatccatacatagctagaattcttcaaagtgaaatgatcgacatacagggattgaccgatcgaatttctggttcaatcggagaaattagctcttcttttggaaattacatcttttcattcctaaatattgttacgaatgtgcttgttgggattgttcttcttccattcattttgttctttatgcttaaagatggaaaaaagctgatgccatcattacttcgagttgttcctaaagcccatcggaaagagggagcaaaaatactagaagatatggatgatgcgctaagcggatttatccagggacagctgatcgtaagtgtctttatcggaacgtttgtttatatttggtatgtcataattgatcttgattacgccttaatcctcgcgatgattgctctcttccttaacgttgtcccatttattgggccaattatcggaacagcaccgggcgttatcgtcggacttattcaatcaccgctaacagcactatgggttgttcttggtgttattgtgattcaacaaattgaaagtaatcttgtctccccgcttgtgatggggcgtaaacttgatatccatcccctgactatcatcttactgttattggtggcaagtagtctcgcagggttccttgggcttattcttgccattccaacgtacgcagtgctaaaagtaatctttacccatacgtatcgcttaattaagctacagcagcgaggcaagcatacaacaaacggataacaaaaaagacaggttctctcggaacctgtctttttactattcaatgacgcgtaccgttacatctttacgaccccagttaagggcgtcttgttggcttggaataaaaacatcaattcgattgtgatcgatgtcaccaccgatgtcagctgcaattgcagttccgtatccttctacctcaacaattgagcctagggggatttgatctgggtcaacagcaatcactttcgcatcagggtatttttctaaatcaatgcccatcttagtaacaccggagcaacccgtgcagtcggccgtataggctgtactttcaacagttatttcttttccagcggccgagtcaggtgatgcaatttgatctaacgctctacgtgtagcaggtccagcaattccatcagccgttagccctttgttacgctgaaactgttcgacagtagcgaccgttcctgaaccgtagatcccatcgacttggccgtcaaagccagctttttgaagctgactttgtatatgtatgacttgttttccaatgtcacctcttctaagtacttgaatggcctggtttgtttctgggccagcgagaccatcgacttgcaaatttcggctttcttgaaacgcagcaacggaattttccgtaatactcccaaaataacctgttgctgtatggtaagggaacattcctttcgttattaaatagtcttgaagttctttcacatcttccccagaacttcctttttgcatcgttcgatctccaaatgatgctgaagcaaaagatggtgtggctacaaaaatggcgcttacgattaaaagcgctgccataattttcattttttgaatcatcatttctcctccttaaatgattttacattacaagtgaaaccattcggctagaagagaggatattcgacgtttttccaccaatatacgacaattcgattagaaaaagaccagataatggaatgattagacaatgaaaaataggctcaaatggaattgatcgttgactctttcacttaagaaaaggaaaatggagtgggtatctaaaagaacggttttaagaaaggggaaacgcgtgttgtgaaagatcttgagcgaaagtggattcatttaattaacattatcctcggagtgattatcgttccatattctattcttgaattcgttgctgttcttcgattagctgacaacaatcaatatttaattgtccctattgggctactcgcactctggctaatactgtatcttgttcagttaaaaaagatgaaaactctccttgtaatgggcgctgtttttctaaatgtgttttacttattttttgttattcctcaattgctatattagaaaactttctggatcttcaacatgatgaatacttttttgaatagcgggtattgtactaaagtggtcatagtgatcaacaaagtacttagaagataaaggagaggaattcaaatgactaaagtattaatggtcgtaacaaatcatacagaaatcgattcagaacacaaaacaggtttatggcttgaagagttcgctgtcccttacaacatcttcaaggaaaaaggatatgatattaaagtaacttcgatccagggtggcgaagttgaacttgatccaaatagtattccagaagaagacccgaaagaatgggaagatgcacagaaccaacttaaaaatacaacaaaggtaacgaaagaagacgcgaataactttgatgttgtgttcctaccaggtggtcacggtacgatgtttgacttcccaaatagcgaagtcctacagcatattcttcaggaacaagctgaagcaaataaaattatcggctctgtttgccatggtccagctggactagtgaacgttacgtataaagacggcactcctcttgtaaaagggaagaaagtaagtgcatttactgattcagaggaacgagaaatgggacttgttgagcaaatgccattcttgcttgaatcaaagctacgcgaaaaaggagcgaactttgaattagcggataactggtcagttttctctgttcgtgacggtaacttgatcacaggacaaaaccctcagtcaagtgaaagtgctgcgaataaaatcattgaagcaattgaaggaaaataagagatattcttatcgtaataaagcgaaatgctttgaatgaatgaggattgaaaaggagtgggcctgttctggttcgctccttttctacgtttgttctttttcctaaagaggaacagagcaagcatatgtagaatgaaagaagaagaggatgatgagtttgaaattaattttatctcacccttttgttaaggtgacacgaaaaatagaacggaacgagcagaaaacgcttgagcaggagcacgacttaaaattatatgaagatcgtattatcgttgggcaggagcaatttgccatacaagatgtgtttgatatgtcgtatcgttttcaatcaacgctatatggctttttgtaccttcatacaaatcgtggtgttgttacgtttattattaaaaaggacccaacggtttttattaatgaataccgaaagctcgtataaggcataggaagcaaaataaaaaaataaattaacaatagcttcgtacatcgcaaaaagagagaaggaggtaggttaatagtggggatcgaaaaaagagtcgtcctttcaaatggggttaagatgccttatttaggctacggtgtttttaagatgagccatgaggaagttataaacggtgtcaaggttgctttggaaactggttatcgaggaattgatacggcttcttattatgaaaatgaagaagctgttggagtggcgataaaggattcaggaattccgagagaggagctatttcttacatctaaagtttggaatgatgaacagggatataacgctacattagccgcgtttgagcggtcgcttgagcggcttggcaccgattatctcgatctttacttagttcattggcccgtaccgcatttattccttgaaacgtggcaggctttagaaaagctctatcatgaagggaaagtttgtgcgattggcgttagcaattttgaaacccatcatcttgaagccgtttctcgtatctcaaccgtgacaccggtgctgaatcaaattgagctacatcctgaattaattcaaggcgaactgcgagattattgccaatcaaaaggaataagaattcaagcatggtctccgctaaagagaggtcaggtgctaagtcattccgttattcaagcaatcagcgatcgttatgggaaaacacctgctcaagttgtaatcagatggtgcttacaacatgaccttcttctaaatgtaaaatcatctcgtgaagaacgaattaaagaaaatgcagatgtgtatgatttccaattaacggatgaagagatgacatcgattgattcccttcacgttgatagccgtatcgctcatcatccagataatctagatttctatgaaagaacggtcccgggttttaagagatcagaatctaccacttaaaaagacgcctccaaggcgtcttttttttgaggtaattactgttttttccaaatatttctcaaggggccatttactccgaagacgggatcagtttcaggtactgggacgttgcgaatgttttgaagtacagaaggtcgctcatctggtgatcctgttttaagatcgtggggacgaccatttggataggcgccgacaacgagaaactcggaggaagcttgttctcttttgtgaccaactcctgcgggtatgacaacaacgtctccttccttcacttgaatcgtttctcctttttcacccccgaacgtaatcgaagcttctccttttgcaataccaagtacttcgtgtgtgttgctgtggtagtggtgataaggaaaaacgccatttttccaagcgtttgtccacttgttcttcttaaaaagggccattgcatcatggttttctagaacagaacggtaaattgtaatgggatagaaagcgttgttcggaatgttaccatcatcatcaaagtaaagcgtttcaaccatttctttctccatttcatcactccttctttcttatgtatacgtttttgagcaaaatgaaacatgagcgtttaggaaatggactgaagggaatctacctaccgaataaacccttcccccttacgtggaaaaagttgagctttggagttgactaacttgtctatacaagatagactacgaagtgaaagatgaacttgtctatacaagatattaaataaatgaaagcggttgaaaggagaagatttagatgttgaaaaaactatttggtaaaaaagaaaaaccttcagaagaggttatttatgcaccgttaaacggtaatgttgttgaacttgaaacggttccagatccgacgttttcacaaaaaatgatgggagacggcgttgcgattgaacctacagatggcaaagttgtatcaccggtaaacggtaaggttattcaatttttccacacaaaacatgctgttggaattgagtctgaatcaggtcttgagattttgatccacgttggccttgaaacagttggcatgggtggcgaaggttttgaaggtcacgtgaaagaaggcgacaaagtaaaagttggagatccacttattactgttgaccttgatcttgtgaaagaaaaagcagcaagtaccattacgcctgtcattattacgaacgcagatgttcttgaaaatgttgagaagaaatactctgctgatgcttcaaatgaaacagaaattatgactacgaaagtaaaaggttaaaggaatgtaacctagggagcactgctcaacgtgctctctaagtaaatagctttttttactaagggggaagaaaacatggcgattaatcgagagtctgttgaacacattcttgaagccattggtggaaaagagaatatttcgaccgccacacattgtgtgactcgtctgcgtcttgtcttacatgatgaaagtaaagttgatacaaaagcattagaagataacgaacttgtgaaaggatcattttcggctaatggacagttccaggttgttattggacagggaacggttgataaagtatttaagatttttgcagagttggcagaaattgaaagcgcgtccaaacaggatgtgaaagacgcggctgcaagtaaacagaatttccttcagcgcggtgtgaagacgctagccgatatctttatcccgatcttacctgcgatcgttactgctggcttgctacttgggattaataatattctcacagcaccagatattttctttagtgatccgcttgtcgaagtttatccgcaatgggcggatttggcgagtattattaacctgattgccaatacagccttcgtctttttaccaggtctgatcggttggtcagccgccaagcaatttggtggaagtccattgctcggtattgttcttggtctcattctcgttcatccggacttactgaatgcttgggcatacggtgaggcagatgatattccaacgtggaacttattcggacttgaaattgagaaaatcggctatcaaggtcaagtgttaccagtacttgtttcagcgtatatcttagcgaaaatcgaaacgttcttaaataaacgaataccagattcgattcagatgttgatcgtggcgcctgtagcgttacttgttactggttttcttgcatttacactaattggtcccgtaacattctggattgcaaatctcttaactgatggctttattggcttgtttgattttgcgccagctatcggtggactagtctatggtgccttgtatgcaccgctcgttattacagggatgcaccacacgtttcttgccgtcgacctacaattaattggtagtacaggcagtacgttcttatggccgatgctagctctatcgaatattgcgcaaggtgcagctgcacttgcgatgatgcttatcactcgtaatgaaaaaacaaaaggtcttgccggaacgtcagccgtgtctgcctttcttggtgtgaccgagcccgctttgtttggagtgaacttacgctttaaatttccattcttcgctgctatcatcggatcagcgatagctggtcttgtgattaccgttagtggtgttgaagctacatcaattggtgtaggcggtataccaggattcctttccatttttaaagaatactggggtgctttctttacaggtatggctattgtacttgttgtaccatttgttttaacattcttatatggaaaagtaagaaaagttagcgagtaaagaaaaggagcgatatcattaggtgcgtaagagctccaatggtatcgcctttgtttttgactgtttaatctaacaataggagtggaatcagatgcaaccatggtggaaaaaatccgttgtttatcaaatttatccaaaaagctttaatgatacgacaggtagtggaacgggagacattcaggggattattgaaaagcttgattatttaaatgagcttggagtagatgttgtttggttaacgcctatctatgattctccgcaaaatgataatggttacgatattcgtgattattttagtatttatgaagagtatggcacgatggaagactttgatcgtcttttaaaagaagctcatgcaagagatataaaggttattatggacattgtcgtaaaccacacatcaacagaacaccagtggttcgtagaatctcgaaaatcaaaagataatccttatcgtgattattacatttggaaagacggcgttgatggagcagaaccgacaaactggcagtcaaagtttggcggcaatgcatggcagttcgataaggaaacgggtcaatattatttacatctttttgatgtcactcaggctgatctaaattgggaaaatgagaaagtgcgcgatgaagtgtatgcaatgatgacattctggtttgaaaagggagtagatggcttcagacttgatgtcattaatctgatctcgaaaaatcagaacttcccgaatgatgatgggtctgtcgcacctggggacggacgcaaattctatacagatggtcctcgcgctcatgaatttatgaacgaaatgaatcggaacgtctttatgaagtataacagcatgacagtcggcgagatgtcgtctactacaattgaagactgcattcaatattcgaaccctgaacgtaatgaattaagtatgacgttcaatttccatcatctaaaagtcgattacccaaacggagagaaatggtctgtagcagcctttgatttcttaaagcttaaagagattctttcaacatggcaaacagaaatgatcaaaggtggcggatggaatgcgctcttctggtgcaaccatgaccagcctcgcattgtatcgcgatatggaaatgacggtcagtatcgacgtgagtcagctaaaatgcttgcaacaacaatgcacttgatgcaaggtactccgtatatttaccagggggaagaaattgggatgacaaaccctaaatttgatgcgatttcctcttatcgtgatgtggaatcattaaatattttctcgattttgaaagaaaaagggtacagtgaggaagaagttcttgagattttacgccataaatcaagagacaattcaagaacgcctgttcaatggacgtctgaacctcatgctggatttacgacaggggaaccgtggattccagtggcgaaaaattatgaagacattaatgtagaagatacgctaaatgaaagaaattccgtatttgaacactaccaaaagctaatttcattaagaaaaagtgtcgatctgatcacatatggagactatgaactccttttagctgaagatcctcaactatttgcttatgtccgtaatggagagaatgaaaagctacttgtcattaataatttctatgaaacagaagcaacgtttgaactgccgtcccatattgaagtagatgggtatcatgcggaggtattgatttcaaactacgaagattctccatcaacctttaagaaagttacgttacgaccatatgagtcgattgcttatcatctaactgagacaaggtgagtctatgaagcaaacgaagtatcagcaaatttacaatgatctctctgagaatattcgaaacggaacatataagccgaatagtaaactgccatctgagcatgatcttgcagaaacatatggcacttcaagagaaaccatccgcaaagcattgaatttactatcacaaaacgggatgattcaaaaaattaaagcaagaggatcggtcgttcttgacttaagtcgctatgaatttcctgtgtcgggacttgtgagcttcaaagaaatttcagaacagatgaaccgatcctcaagaacaatcgttcatcatctcgagaaaaagttaccagaggaatggattcgcgaacaacttgagcttgaagcgggagcagaagtttggcacgtccttcgtgcacgtgagattgagggcgaaaaaatcatcttagatcgcgactttttttctgctaagtgggtacctgaacttacacgaacgatttgtgagaattcaatatacgattatttagaaaatgatcttggtctttccgttagctatgcaaaaaaggaaattgtcgtagaagaggctgacgaagaggatcgacgttatctagatttgcatgattacaaacatgtcgtggtcgttcgaaattacgtttatttaaatgatacaacattaattgaatataccgaatcacgacaccgtcttgataaattccgatttgtcgattttgcaagacgtgaaaaacaatagagagggcgctccaataaaatggagcgcttttttatgttctttttactttgggggaaggaaaccctactctattctcgaatggagaatggtgtcggaaaacatgagaggagctatcacgttgaacgtaaccgaaaaaaagataacactcacgaaagtagtatctcaccatcttacatcgttaaagcaatttaccttacatgaacatcagctcgctttcacttcaatgccgatgcctgcctacgaaaaatgcatacgcgaacctaatcgtttacccgtagccattatggaaggagttcgaacagttggtttttttgtcctggatcaaggggacgatgttttctcctatacaactagtccacatgcgatcctattaagagcgtattcaatcaacttaccagatcaaggccgtggtatcgctaagacatctcttagacaattaaaaccatttgtagagaaacatctgcctgactgtagagaagtcgtgctcggtgtaaataaaaataatccttcagcgaaaaaagtctacatagaggctggatttattgatacaggcgagcagaaaatggggcgctcaggtcctcaggcgattctaaaattttttatgtaatcttcttgcgcttcgcacactcataaaagctagttgcatgccaaaaaagatgtatggaaaggagagttacagcgtgtggtatgatacgccagtgacttcaatgttaaacataacttatccgattgttcaggcaggaatggcgggtggtgtgacgacacctcagttagttgcttccgtctcgaacgctggagggcttggaagcttaggtgcaggctatatgacacctgaacaaatgaagaaggcaataagtgatattaaactgctcactccgaaaccttttgcggttaacttatttattccagaagacgatccgtcttctgaagagagtattgcaaacgtgcaattaaagcttcaaggctatgctgaccaactcggtatttctgaccaagaacgtaagaggaagtcgtttgtagaaactcaaaaagaatatcaagaaaagcttcagattatcattgatgaagccgttccagtatgcagctttacattcggggttccttctatagaagatgttcagcgtttaaagaaagagaaaatgattttggtgggaacggctacgactgtaaaagaagcgatcatcaatgagaaacgcggagtggatcttgttgtgatgcaaggaatggaagcaggcggtcaccgtggaacgtttacaggtgattttcaagcctcactgattggcagtgcttcgctcattcctcaaacggttgatgctatccaaattccagttattgcagcagggggaattatggacggaagaggggttcttagtatgctcgctcttggggcagatgctgttcaaatgggcacagcgtttgtaacgtctcaggaaagtggtgcaaatccagttcatcaacatgctattttaacaagtacagaagatcagacagttgtaacgccagtgtttagtgggaagcctgcacgtggcataaataatgactttgttactgagatggagggtctaaacgatctacctggatacccgacgttaaatacgttaacaaaagaagtacggaaacaagcggcgattcagaaacgtccagagtggatgtcgctatggtcaggacaaagcccgcgcctcagcacatctaaatctgcggagcaaatcatcgatcatagtgtgaaacaagtgacggacattttggagcggttaaactaaataggcgctataaaactgatcaggcccttctcacaacgtgagaagggccctttcaatgacttgcattggtacggccggtcatctgacagcatcttttattatgaaaagataatgaccggctgtatcatgaagtttagtcataaatcagtcagacaatacctgtttgtttagaaagttatcagggaagtgtaaaacgaacagaaagtatgtagaatttaaggaggacgtttaacgatgaaagcagtagttattaattttggaaaaccttccaactttagtataacaactctctctacaagagagttgaagccaggggaattgaaaattagcgtaaaagcaacaagtgtcaatccagttgatacaaaggttcgttctggtcaagctgaagcatttgcaccagcatttccagcggttctccatggtgatgtcgctggtgttgtagaggaagcatacgaaggaagcccttttcaaaagggtgatgaagtgtatgcctgtgcaggtggtgtaaaaggtcttgacggagcacttcgagaacaaatgattgtcgaccaaaagctcgttgcgaggaagcctcaacgattatcgatgaaagaagctgcagcactaccgttagtctccattacggcttgggaagcccttgtggaccgcatgaacgtgcagccaggtcaaagcgttcttatccacggtgcaacgggtggcgtcgggcacatcgccattcagcttgcgaaatctttaggtgcgattgtgtacacgacggcgtctacttcagagaaaatgaaaatcggtcaagatcttggagcagattatgcgataaactataaagaaacaaccgtagaagaatatgtaaagcagtatacagatggcaaaggatttgatgcagtttttgatactgtaggcggtgggaatatggaaaaggcgttccaggcagtgaggaacggtggacaagttgcctgtatcgttggtagcggtgagcatgatatgacaccactgtatgtgaaaagcgctacatatcatggcgtattaatgctcataccgatgctaactaatgaaggaagagagcaccatggtgaaatcttaacgagcgtagcgcgaatggtagaccatggcgtacttaaaccggtgttggatgaagaaagctttacgttctctactattgctgaagcacacaatcgacttgaatcaggaaagacgatcgggaaagttgtagcagagaatgatcttacagattcttaagaactgaataaaggtatgacaaaaacaccccggaagttagttttttaaccctaacttccggggtgcactacctttctacatgtggaaaggttcctttttttagataaagaattcgaaaatgaaatgtatgcgttagttcgtccactcggagacgagttcttcgttctcttcaatccactgctgtgcacctgtttcggcatcatcagcgtctttgatcgtagccatcagactaccaagagaatcatcgtccatctgccaattgttcatccattcaacaatctcagggtgatcgtcactgaaatttgttcttgtcatgaaaaagatatcatctgcttcaccgtagacgttcttaggatcttcaagatatttcaaatcatattctgcaaaagcccaatgagggttccacagtgtgacaacaatgggttcctcgtcttcatacgctttttttaattcactcatcatcgcaggccctgaactatcaacaaggtcataatttaagttatattcttcaagcgcggtccgactcatttccatcaagcttgcaccaggatcgataccgacaatttcttctatgcccagctcgtttttcttgtcatttagctcctccatgctcgtgatgtccatataagaaggaacgacaagtccaagccctgtaccttcataccaagcttcgtgtaaaacaatatcttctttgtattcctcgtacaatggtttatctgttgtgggaagccatacttctgcagctatatcaagatcgccttgtgaaagcccggcccatacaggggatttctccattgatttcagttcaatgtcatatcctttatcttctaaaataactttccacatgtttgaaaccgcaatgttttcagcccagttgtttaagcctaacgttacggtacctttcgatttctctgcaccctcttctgaaccgctacatgcagccagcgacagtgctacaatgaccatgattaaaattcctctcctcatagatactctccttttttctcttctctttttatgtgcgaaaacgcacatgtttcttatcttaacaaatgtgtcacagttttgcaggtttattacaatttcgggacggtgtatgattagaggtgaggagggatggggaatgatcacgatcgcaacgacgcttattatcatttttcttgttattattctgattggtacattgatggttgctggaaaaagtgatccggggtatggaaagaaggcgaaaaatacgaccgtcaccatttcagccatttatcttttggtaaccgttttagctgtagctggaattgccgtatacgtctattttatttaaatgttcaaccacaaaataggactgaaccagttttaggtttagtcctattttgaagcgacaaagatcatctcagctgcgagatagccgaatcgtaacccgaagaataataacacgacactagcggttacactaatggcacgaagggtacgaggttttaataacgtttttccgaaatgcacggtcatacagaggttgatattccagaggccaattccaataaacacgagagcagatagaaagaatgcctgccatttatcaggttgctgaagagaaacgcttagaacagagccataaatgcctagccagaataaaaggttcattggattaaaggcagcaatcataaaaccagtagcataagagtgtataagtccagacccctctttgtccttttcttcatcaagacttactcgtgataagaacccttgtatcccagaaaccgttaaaataatcgcaccaagaagcatgagtgagatttggacagcggttaacttaacaaatgtcgcgataccgaaatacattaaatacataagaataagatcggcgctcatcccaccagctccaacaagaagtgacgaccaaaatcctttatgaatccctcttttcatgatctcaatattgatcggtccaagtggcgcagcaatggataagcctagaacgatatgagttagtgcaatctcgaacatagcatccattctcctttattcataccttgaatattttacataacgtgatttttcatactcattcttacctaccttaatacatgtcctaatggtgtaaattagaagtccaattttgaatttgttcgaaaatatgctattatgcttttttgggtcgctcaatattttgaagaagatgtggaaaattgtataatgaaggttactactaccattggaattgatgtgatgtggatatgaagcatttttctatgtttacaaaaagtgaaataaaagaacgttttccagtcagcttctatcaacgggggctaacgtattttcaaaatggacgcgtttctgagcttacatatgatcaagaagatcaatcttaccgagcttatgtaaacggcagttcagaatatggcgtgttaattgagctacttggtgataattggtttggatcttgtgaatgtcaggcatttcaaacctatggaacatgcaagcaccttgctgctgttcttatagcgattagtgaagaaggtccgccagagaaagaaagcgagaaaccatcgcaggtaactcaatcaccacgaagttataacgaaacgaatcagcttatccaagtgctaagcgattatcaaccggaaccaggtcgctcaaacacgagagcagatgagcttcaggttgaattcaccttgaaagcaagctcatacccaactttacgcaaatctcaaggggattccccctggacgctagagcttaaagtaggggtaaatcggttatatgtcgtcaaagacatccgctcatttcttgatgcagtccttgaagatcagtcctattggtttacgaaaaagttcagctatgaacctgatgaacacacgtttcatgaatcagatgagccactcatgcaaattctgctttcgattagacggaacgaaaaggtttatttggatttgcctgataattggggacgtttcactgaaaaccgagaattaatcctccctcctataacagcaaatgaatttcttgcagagtatttaaaacaaggtcgttccttacgttttgagtataatcgcactcttcacgaagaaactgcgcttgtggatcgtagtcttccattttcatttgaaattgaggagaaggataatgattatgtgattcagttaaatggttttcaaagcgcagcatacttcccaacttatggctggttatttcatgatgaaaagcttttcaagcttactaaaaagcagcagtccttattacgggacctatcagcttttcgaaacgctgctagaaaaagtgaactttctatttcacccgcacaaattgagccttttctatctcaagtcgttcctggattaagaaaacttggtgacgtgatcatttctgagcaaatcaacgataaaatcattaatccggatttacaagctcgagtgtatgtgaatgcagagggagagcggttgctcgttacggtagaatacgaatacggtgatgatgtgatcaatccatttaaggataattctcggattgtcaatgaacagggaggcattgttcttagagatagtgagaaagaacaaacgattatgtcgttgattgaacaggcttcattgaaatttaacggaaaagaactttacgttgaagatgaagcgttaatttttgattttctttattggacaatccctgagctaaatgaccttgcggatgtttttctaacagaatccgcacgagcctggttattagatgaatcatcagctcctgtgacatctgttgacatggacaacagtggcaattggctcgacgttagttttgacatgaaagggctcgatgacgaagagatttcgaatatcctaaaagcggtcattgaaaaagaccgttattatcgcctttcgaatggtacctttgtttcaatggaaaatgaagattttcaacatgttagtcaattattcgacgacctaaatattaaacaaaatgatattgagcgaggggagcttcaccttccgctttatcgtggcctgcagcttgatgaaagaatgagtggagggaagcacgcatctcgttatagcaaagcttttcgagaccttatctcgcgactcaaacatcctgaagatctccaatttcatcttccatctggcctagaagccgatctccgttcttaccagatgacgggttttcaatggttgaaggcgctggcgcattatcatcttggaggcattcttgcggatgacatggggctaggaaagacgttgcagagcattacctatttgctttctgagaaagaaaataaccctgacgcgactgctcttgttgttgccccggcttcactcatttacaactggaaaaaagaatttgagaagtttgcgccaggactcatgattgaagtaaacacgggtactccggcagaacgaaaggagcttcttagcaaggggcttcaaccagacgtatggattacttcgtatccgacgctcagacaggacattgatcattacgaaacgattcaatttgattccgtcattcttgatgaagcacaggcgattaaaaacccggcaaccaaaacgtcgcaggcagtaaggatgcttcaggcaaagaagcgttttgcactaagcggtacgccaattgaaaattcactcgatgaactatgggcattattccactcgattatgccagggttctttcctgatcaagcgacgtttcgaaatttgcctcatgagcggatttcaagaatggtcaagccgtttattctaagaagagtgaagaaagatgttcttaaagagcttcctgacaaaattgaaaccgttcaggtttcggagttaacaaaacagcagaaagagctgtatatcggctacttgcaccgcattcaacaggaaacgaaagaaagtctcgctggcgatggttttcaaaagaatcgcatgaaaattcttgctggacttacgcgtttgcgtcaactatgctgtcatccgtctctttttgtagaaaactatgaagggcaatcaggaaaacttgagcagcttttagagatcgtcacaacatccattgagaatcaaaagcgactgcttattttctcgcagttttctagtatgttgaaaatcattcatcaaaagctagccgatcttggttattcggttttctatttagatgggcaaaccccttcgaaagatcgcgttgaaatgacggaacggttcaatgggggagaaaatcaaatctttttaatctcattgaaagctggcggcaccggtttgaacttaacaggcgcagatacggtcattttatatgatctctggtggaatcctgcggtagaagagcaagcagctggtcgcgctcatcgaataggccagaaaaaagtggtgcaagtgatgaggttaattacccagggcaccatagaagaaaaaatttatgagcttcaacagaagaaaaaagagctaattgagaaggttattcaacctggcgaaacgatgatttccagtttatctgaagatgaaattaaagatattttaagtatctaatggataggcattcgccatgccgtatagtgtataagaaactaacaaacactagctaatggaggatatgagaatggatgtatgtgaattatgtggaagaagtggcgtgacgtgtacaatccatcacttgacccctaaggaagagggtggaacacataaaccgaccgcatctctttgtgtcccatgtcacaagcaaatccatgctttatatacaaaccaggaattagcgattagactcgattcggttgtgaagctgaagcaggacgaacaaattcgtcgttatttgaagtggatccgaaaacaacctgcatcaaagagtgtgaaaatgaaaaagtcaaatcatcgaaaataaaaaaaataaattttcggattttattttttcaaaaacccttatgatatgcaggttttgtcaactaaatgcggcgcacagttatttagtactagaaattacgcgtttcgacattttttatagtggtataaataggtagaggtaaaattgtactaatttatactatgagattacagaaattattctaagttgaggtgaagtgtatgagggaaaaagtatcctccgtgttttggagcacgctggtaattagtttaattatggtagcctggggggcaatttctccagatacgttagcatccatgtcatcaagtgcacagtcatttatttcaaacaagttagggtggtattaccttattcttgttacgctgttagtgattttttgtgtgtttattattttcactccgtatggaaaaatcaagttaggaaagcctgatgaaaaaccagaatttacacgattaagctggtttgccatgctgttcagtgcaggaatgggaattggacttgtattctggggaacggcagaaccgatgtcccactatgcagtcaatgcaccgactgcagaaacaggaacacccgctgcaattaaagaagccctacagtattcgtacttccactggggagtgcatgcatgggcaatttatgcaatcgtagcgcttgttcttgcttactttaaatttagacatgaccgtcctggtttgattagcgctacgctctatccaatttttggtgagcgagtaaatggattgttaggtaaggttatcgatgtacttgccgtttttgcgacaatcgttggtgttgcaacgactttaggatttggagctgttcaaatcaacggtggactttcttacttaactgatataccaaatagctttagttcacaactcattattatcggtgttgttaccgtgctgttcatgatctcagcttggacaggaattgggaaagggattaagtacttaagtaatgcaaatcttggacttgcaggcatacttttccttgctgtgtttatccttggtccaacaatttacattctaaatatgtttactgataccattggtgcatacattacaaactttatggcgatgagtttccgcatcgcgccattgaatccagaaaatagagaatggattaacaactggaccattttctactgggcatggtggatttcatggtcgccattcgttggtattttcattgcacgtgtttcacgtgggagaacaattagagagtttcttgtaggcgttcttcttgttccttcaatcgttggtttcctatggttctcaacgtttggtatttcagggattaatattcagcagcaaggaattgctgatattgcctctcttgcaacagaagaatcgctgtttggaaccctacagaattacccactaggtacggtgttatcgattgtagccattacgttaattggaacattctttattacatctgctgactctgctacgttcgttcttggaatgcagacgacatatggttcattaaatccaggttcaagcgttaaattaacgtggggaattatccaatcttcaatggcagctgttctcctttacacaggtggactacaagcgttacagaacgtactaattctggcagcattaccgttctcgatcattatgatccttatgacggtttcgttctacaaggcgcttaagaaagagaaatacttggttgcgaaagatccgaaacctaaaaaagaaaagcggaaagagaaaaaagcaggcactgacaacgtagacaatcccacacctgcaacaaaatagcttcgaaaagacgatgagataacctcatcgtctttttgtatggattcgttaaatctttacaattgtgaggaggcaggataaaataattgagattatttattattgttgaagtggggatgaataatgaaggctatcgtgcaaatggctagtgaacgagttttgaatcgaaaaaagcacattgcagaacaaattacgagtgaacaaaataaaaaataccccaccgagctcaaagataaaacagatgagctttttccattgcgtgtggaattggtaacgatttatgctaggtcactcgcacttcaagaagaggaagcagaaaaaagtattgaagcgtggggtgttgaaacaggaagaatgtgtgcacgcttagaaacaacccttgattcgatgctaggcgaagtgccacactatcgtaaatacataggcgaggttataaaagaagtagcgattgaacaacagttaggcattgaagaattgtatgatctcatttctaagcttgatcatgctatgaatttagtcgtttattattttagcgttccgtttgttgaataccagacgaatctgcttgaacagtctagaaacgaaattctagagttatcagcacctgttgttccaatcatggaaggcgtagcggtattgcctttgattggaacgattgatacgtatagagcaaagttgattatggaagaatcactcaatcaaagcgtccgccttcgtttgcattactttgttttagatctttcaggggttccaattgtagatacttttgtcattcagcagctttttcaaattatcgaagcacttagacttgtcggagtggaagcaaggattagtggcataaaaccagaaattgcattatcagtcgtaaaactagatattagtttcaaaatggtgaacacctattcgactttacaacaagcacttgccgatttagttatccaaagctaattttgaaaaaacaattaaatctttcaattttgtaaacaaatcagccttctgattaactttagttaacaaatatcaggacctagggtttagaaattcgcatatatgtgaatggttaactattggataaatgaaagctggtgattctatgcttacggaattatttaagaagtccagacatactgtcgttcttacaggtgcaggaatgagtacagaaagcggtttgcctgactttcgatctgcgcttgatggcatgtggaacgaggtggacccactccagcttgcaagccgagacgcgatgcagtacgaacgtaatatgtttgttcgtttttataaacagcgcataaaaaagttgaaagaggcttctcctcataccggatattttcatctcgccgaatgggagcgtagtggagagatcggatcaattttgactcaaaatgttgatgggttccatcagttagcggggagccgaaatgttgcagaattgcatggatcgttaagagtcatgtactgtgatgattgtggtgaaaaatcttctagtgacgggtatttagatgatgttttagcatgcaaatgcggtggttttaatcggcctggagttgtactattcggtgaaccattgccgctaaacgccattcaccaggcaaaaatagaagcaaaaaaagcggatttatttattattctcggctcttctcttcaagtagctccagcaaatgtttttcctatggaggcgaagcgaaacggagctaagcttgtcattgtgaacgaggaagaaacggattatgacaaagtagcagatctcgtgatacatgataaaataggaaatgtattggctgatctagcggcaggtaaagcactatcggataaaagaaaatagagtaaaaaataccgacgcgtgtcggtattttttttggtgggattccctctattttttaaactttagaaatagtaagataagatgaggaaggagttgggaaatggtgattaacctagtaccaatgaatgaatttgatttcaaccaatttttagacacttcaattgataactatgctaaagaaaaagtggctgcaggtaactggagagcggaggaagcctttgagaaatccaggcaggaatttgatcggttgttacctgagggcaggaatacagatgggcatactctttatacaatagtggtagaggatagtgaagagaaggtaggtagcctgtgggttaaaacggacaggaaagcaaaagaagcgttcatttatgaatttaacgtttatgacgagaaacaaggaaatggttttggaacggaagcgataagcgtccttgagaggatcttaacagaacaaggaattacaggactgtcacttcatgtttttgctcataataaacaagccattcgtttatatgaacgtctaggatttgaaacaacgaatattaatatgaagaagatattgaaatgagatattgaaatgatggtgtaaaaggtagagaggaggatgaaaaggtgaatgatttgaagagaataacggttttttgtggatcaagtaataacgttgatcaggaatattttaaggcagtggaagaactgggggctgttcttgcagaaaaaaatattgaagtgatctacggtggcgggaacgttggtctaatgggcgcgcttgccagaacggtgctgaaacatggcggtcgagtaatcgggatcatcccacggaaaatctatgataacgtcagtcatatcgagttatccgaccttatcattgtagaaacaatgcacgaacgaaaggcaaaaatgtacgagtcaggagatgctttccttgctcttcctggtgggatcgggacgctcgaagaattaacggaaatcttcacgtggtatcagctggagtatcataataagccaattgggcttttaaatacaaaagggtattatgatcctttttatcgcatgcttgaacatatggtgaaggaaggctttctccataagcgctatatggaacctttgctaacggaagaaagtcctaaaagattagttgaaaacatccgttcacactctgttccattaatgaataagtggaagcaagatgatatcggcgatcgcatttaaataccggagaatccggtatttttttgttgaattctatcattaagttaaacaatgtgcgcgattaattgatgaaatattcagataaaaagaagggtttttaactgtgagaatggaactatacatacgctacttaaactcaagttaaaaagaaaatggagggtttaacatgtatggtacgatcggttctttatttcttcaaacggtaaaaaagtatggtaaggaagaagcgcttgtggatgtcgaccgggacatcaggtggtcttatgatgaatggaatatagaggtgaatcggctttcaaacgcccttctagatgcgggagtaaaaaaaggcgatcgcgtatccacttttttattcaatacgatagaattagcgaccttatttttctcatgtgcaaagataggggctgtgttaaatcctattaattttcgattgaaatcaaatgaaatcgcttacattattgaggatgccaaaccgagtgttttcatatttgagcctgctcttggatcggtcgttgcagaggttcaagaacgatatccggatgtatcgttctggtcaacagaggcggcaccggactttgctgatagctacaatgaacatgttcgtctttcacatagtggtgaacctacgattgaagtagatgaaaatgatacgtatgcgatcatgtacacaagtggtaccactgggcggccaaaaggagtgatgcatcgccatcgaaacatgcttgaacagagtattctttgtggcgcgtctctcaacttgaaacaggtggatagagggcttgttgctgcaccgatgtttcattgtgcagagcttcattgcaactttttaccgagggtacattttggagctacgaatgttattattcatcattttgaaccaaagaaagtgcttcaggttattgaacgggaaaaaatatcggtgttctttgcggcacctacaatgtggaatatgattttacaagaagattatgcagcatttgatcgaagtagcttgcgggtaggtttgtatggtgctgcacctatggccccatcactcgttgttgcagtcaaagaaaagctggggattaatctcattcaagcatatggcatgacggaaatgggacctgcagtgacctttcttgatgaggatgagcaattaacaaaagtgggatctgcaggaagagcggcgctgaaccatgaggtaagaatcgttaaaccgaatgaaaatggaccgtctgagcctgatgatgagctaccagctggcgaagttggtgagattattgttaaaggaccatgtatgatgatcggctattttaatcgtccggatgcatcaaaggatgcgatgtataaaggctggtaccattctggtgatcttggttatatggatgaagaccgctatgtctatgtctctgatcgtgtcgatgatatgatcatatctggtggagaaaacgtctatccaagagaagtagaagatgtcctacatgcgcatgctggagtacttgacgttgcggtacttggcgaacctgatgaaaagtggggagaaatcgttacagccatcattgtgaagaaacaggattcactaactgaagctgaattagatcgttactgcaaagagagtccaaaccttgctacctataaacgaccgcgaaagtatttgttcgtagaagagctacctcggaatgccagcggtaaaatccaaaagtttcgacttcgtgagcaatttcaggttaagtcgaactaaccttaggtgagatctatgaatgaacgatttgattcattggacatgaaatgattttggacgttataattggaaattgcaagaaaaaagcgggcatatgctcgctttttttcagtagtatgattttcatgaattttaaattgacgtacatactactagtgaaaaggaggaatggcgaatgattaaattatttactgatagcgatcttgatggaacggcctgcgcgatcatagcagaacttgcttttgacaaagaggcagacgtgacccattgtacatatcgaaatttagatgaccgggtcgaaggatttctacaacaaaataatggagatccaatcttcattactgatttatcagtgaaccaacacgtagaaaagcttttagatgaacgctttcgtgaaggatctcacgttcaaatgattgatcaccatgcgactgccatgcactttaatgagtataaatgggggtttgtggatccgggtgagaatcaaaaaacgtgtgctgcgacgcttttttatgattttctattggaaaaagaaaagattgagcgcctagaaagtcttgagacgtttcttgagcttgttcgaaaatatgatacatgggaatgggaagaagaaaatgaagtggatgcgaaacgattaaatgatctattttccatcatgggtagagaaacattcaaagctgagatgatcaggcgtttaactcgggaacctgattcttttaaatttaatgattctgaggaaatgattcttgatctggaagaacgaaagattgaacggtacattcatcagaagaatcgtcagcttgtgcaaatgtttgtagatgaatattgtatcgggcttgttcatgcagaatcgtatcattcagaacttggaaatgagttaaacaagcgaaatcctcatcttgattttattacgattattaatgcgggaagcaaacgcttaggttttcgtacgattcatgacgaagcagatgtttcagagtttgcctcacgttttggtgggggaggtcatcctaaagcggcaggttgtgaactaaatgctgatacgttccgaatttttgtggaaccttcttttgcgcttaaaccagttcgaaaagatccggaacgaaataagctgaatgagcgtaacagtgaaagcggctctttctatgaaaatcatgatgggaagatcatttatattcgtcctcgccgagaagatgagtgggaagtgatgtgtcgtggggaagtggaagatattgtgtttcaccagttcgaagatgcggaacgccatgtgaaacgaacttaccatgcgtggcttcgttcggataaagcggttgtggaagattttgtgagcattcttccactaacaaaagagcagataatggatcggtaccatacaatgattaaagcgatgctttatcaagaagaagacgttcttagttgaacgtcttcttttcatatagaattcacctcggttttatatctttttgtttcatttattccttatgcttgaagcatagaaaggggcaccatggatcgtgtgtctaaaggtaaaatgagtgaagaaaataagaatggttttaatagtggctatatcgagctatctattttcaagaattcgtcttcacgaacgtattctaaaaacagaaagtgaagaaaaataatggtggttgtttgctaaaccgtttcttttttcaattacatgggtatagtcttatacatgcccatggcactcaaccatagcgttgcgagcatgcattatgggtgtgaaaggagaaaacagtgaagcgaatcatgtttaacaatcgctactcgcaagtcctctaccagacacagaaagccagagcacgatgcataaagttagagaaaagaccgtacatcaggacgatcgcgactgtaactggattctcagaagaagagatcttagaatctcttgaatttggtgatgtcgactacatcatgaagctgcgtttgcactatagctagacgcgacgttatgcgttgtagcgccattagggcatgccacctctttgttgaaccgtgttcaaaaagagagcagctactcatctataattttggaggctgattatttctaaatagtcggctttttttgatggatagaaagtgaatttatctattaaattaactttttttcaaaatcatggaaccttattcttgcgagagtcgtagatagaggtgacattattttgaaaggttgtgtacatagtgaatgacattcatgaagaaacaagtaatgcagagaacccatcgttagtagggatgatttggagtcctggtgaacaatttgccaacatgcgctcgaacccgaaagtatggttgcctctgatcgtcgtaactgtgctttcattaatcggcggctggttaatggtgattggacctggatttgaagagcagtttgcaacagcggagttagaaggcgagaacattgacggcattatcttattttcaaagattacaacggttgttttttctgccattgggccgattctaggtattctattctcaagctttattttttggcttattaataaggcaacaagttcagaagctacgtttaagcaatttttctctatgaattcctatattgggttcattagtgcaattggtttagttctaaatggcattctcctagcactattaggagggtcaccaggaaaactttatacgagcctgggcgcattagttaattcagaaagctcaattggcgcttttcttaatggtattgagatttttgggctgtggacaattattttaacagccataggacttagagtgactgccaggtggcctaaaggacttgcgtggacaattgcgattattttcctagtctttacgataggggcagcagcagttggtagtatgatgaataatatgtcgggaatgtaaggcatgaagaaaaagatttggatcaccatagcggttgttatcatacttactctcgttgtaggggtaaatatttatcgaacctatgccgatagtacagcgaatgtaaaaacagaaacagctaaattcgaagaaattaattccactgttatgacgcctggaacgttggcgatggctgatgaaagcacaatttatcaggattctagcaaaggcgagctgaaagaaattcttgttaatgaaggagactctgtaaaaaaaggagatccagttgttagctataagaacaaagatttagaaatggagaaggaacaaaacgagatcaacattgagtcgctttatcttcggatcaattcactggataaacaagagaagcgtctgaaagagaagaaaaacgatttagcagatgatgttggagaagaagaagcagaagaaacgatggaagctgaaatcgaacaagtgaaaatggacaagcggatggccaatcttgatttacgtcaggcattattgaagcgagatcgattaaagcagaagataagtgaccttgaagaaaaaagcgaaattagcggtgttgtactagaagcaaatgattcaagtgccccacagtcaactcagatggagaaaccgatcttgcggattggaagcatggaaaatctcatcatagaaggaacgctttccgaatacgatacgttgaacattgaagctggtcaaaaggtaacgattacgacagatgtgctccctgacgaaaagtgggaagcagaagtaatggaagtaggttatttaccacaagcctcttcacctgaggctaatacgtcggccgtgcaatatcccgtttctgttaaatttaacaacccggaagacgtttcattaaaacctgggtttcaaatgattattgagattgaaacagagtcacatgaagctttaaccgtacctttagaagcggtgcaacaagatggagatgaatcctttgtatttgttgtagaagatgggaaggcagttaaccgtcaaattgaaacaggttcttctactacaaaacgcattgaagtaacaaaaggattatctgagaaagctcaagttgtggtggaagctcctgatcatctcaaggataagatggaagtgaccgtgcaatgatccaacttgaggagataacaaaaagctatacactaggcaaggaagcagtgaacgtgctgagaggaataagtcttcaaattaaaagcggcgaatttgtcgcgattatgggtccgtcagggtcaggtaaatcaaccttaatgaatattattggttgtcttgatcggccgactacaggttcttactttttaaatgaagaagatgtttctcaacataaagatcatgagttagcaaaagttcgaaatcaatcgattggatttgtgtttcaacagtttcaactgttaccaaggttaactgcgctaaagaatgtggagcttcctatggtttatgctggtgcctctaaacaagagcgtgaagaacgcgcccgagacgctttagcaaaagttggcttacaggatcgagtggggcaccttccaaatgagctttcaggaggtcaaaagcaacgagtcgcgattgcgagggcacttgtgaatgatccatcgcttattcttgctgacgagcccactggtgcccttgataccgcaacaagtgtagccattatggatttatttgttcaacttaatcaggagggaaccacaattgttgttgtgacgcatgaaccagaagtagctgaatacgccaatcgagtgatatacgtaagagatggcttacttggcaagaaccctttggagaaagggggacaaacgcggtgagtctttgggaaaatattaaaatggctcttatgtcagtgaaagcccataagatgcggtctatcctaacgatgcttgggattatcattggcgtcgcagctgttattgttgtcgtggcgatcggacagggtggagaagcgatgctgaaatcccaaattgctggagatggaaatacaatcgaagtcttttaccagccatctgaagaagaaatgcagcaggggaaatgggaggagaatcctttcactcaagaagacattcgacagttagagggaatcgaaaaggtttcaaatgtggttgcctcttcctcggaattttcaactgccagactccgtgacgaagacgcagaaacgtccattactggcattaatgaagcgtacttggacgttaatcaacttaaagtggagaaaggtcgctcctttacgagtgctgattttctaggcggtcgtagggtagcgatcgtcagtgcagcgatgcaggaagagttatttgaagggaagtcaccgattggagaaattattcgcattggtgttcagccagtggaagtgatcggtgttctagagaagccaacaggtctcttcgcatttggttccgtggaaacgtatattccctggacggcaatgcgaaacatgcttggtacaagtaactacagtcaggttacgctccaagtggaaaatgcagatgacattcagccaataggagagcgtgcaacaacggtcttaaatcaacttcatgacacagacgattcttatcaggtcattaatatggaagaaatcgctcaaggaattgggcaggtaacaacaatcatgacaacgattatcggcagtattgcgggtatttcactgctagttggggggatcggtgtgatgaatattatgctcgtctccgttacagagcgaacgcgtgaaattgggattcgaaagtcattaggggcgacgagacagcaaatacttcttcagtttctcgttgaatcgatcatacttaccttaattggtgggatcatcggtatcatacttggagcagggacggcgtatctcgtgtcgttctttgcagactggccatctttgatttcgtggcaggttgttcttggagctgttttattttcaatgcttatcgggattgcctttggtctcttacctgcgaataaagcctcaagactcgatccaatcgattctcttcgttatgaataacataaaaagaggatgagcccatcctcttttttttgctgttatttttttgaagtgagacgattttttgttaaagcgacttttatttgaaagtaagtgaatgattcaggaagagcttcttttattggctttaatttatcaaatccaactgaatcagctttttctaaaatcgcattttctgtttcctcatcaagcagtcgagttgtgtcttgaaacaatccttcctccaaggcttttagcaagtgactttctactgtagtagggcttaaagatcgagcagcagcaatgtttaaaatgtctttgccctcctcaaataatttaagtgaagctctatggcttacatcttcagaagaagctggcgttgatttagcggaaagcaaaagttctaaaaaagcttcgccgtatttatcaaacttcatctctccaacacctttaatttgaagcatttcttcacgagaggtcggtatgttagcactcatttctcgcaatgtactgtcggcaaacacaacgtatggtggtacgttgtctcgatcagcgatctgctttcgtaaagttcttagctgtgtaaagagctgatcatcttcctcgattgaaacaggcttgcgagcaactttcttgaaaatggtttcttgtccttttaaaacaggtagcgttttttcttggaggactaatgttgggtatttgctttctgttaaaaggaggtactgttctgcagttagaaagtcaatcatatcaacaatttcctgctgtgtaaggtgctttaataaaccaaacgtggaaacgctgtttaggcttagctcatttattcgcttagactttgatccttttagaatttgggcgatcattgttttgccaaagcgttcgttcactcgtttaatggtagaaaaaatcatttgtgcttcacgtgtaatttcgacagcttctcgatcatcaatacaattgctacattttccacatcggtagcctggtcgttcatcaccaaaatagtgaaggatcgttccttgaagacatttttcagtatgacaataatcaaccatagcttttaattttgagagatcagctgattttctttctggctcatgctgattttgctcaattagaaacttctggacgtgaatatcgccaggtgagaagagaacgaaacaatcactttcttctccatcacgaccggcacggccagcttcctgatagtaagattccatattcttcggaaggttatgatgaatcacaaatcgaacattggatttatcaattcccattccaaatgcatttgttgccaccataaccgctatattatcgaacaaaaactcttcctgagcggttttgcgctcatgctctgtcatccccgcatgatacttgcctacttttatcccttgttttagaagtgaatggtatagctggtccgcctcttttcgggttgcagtgtagataattccggattccgctctgttttgactaagatatttgtcgataaaagattttttcttttctcccttaacaactgagaaatgtaagttttctcgtgcaaaaccagagataaaagtttgttctggaacgatatttagaagtctctgaatatcttgaataacttcaggtgtcgctgtagccgttaaagcaacgacaggtggctgatcttcaaagtgatggagcatttggctaattttcatatagctaggtctaaaatcatgtccccattgagagatacagtgcgcctcatcgaccgcaatgagagagatggttgttcgctgcaataaacgctgaaaagtaggtgcttctagacgttccggagcaacatagagtaactttaactctccattttctgcctccatcattcgttctcttatttcgttttctgtcaaggagctgttaatataagcggcatcgataccgtaacttgcaagcgcatcgacctgatctttcatcaatgaaataagtggagagatgacgatcgttagtccctctgatataagagccgggatctgatagcagatcgacttaccaccgccagtaggcataatacctagcgtattatttcgagatagaacactcgaaatgatctctttctgcccaccccgaaattcatcatatccaaaatggtgtttaagctgttcttttgctttaagaagcatcgtatcttcctttctaattcaccagaagttcgtttgcttttttcatcttaccgtatctatggaactgtgtatagataactaatttacgaatgaatttgcaagcgtaataaaaaggataaacatttagaaaacgggcaaactactacaatatggaaaaaataagtggttttacgtcaagaaaaaggggaatacgcatatggtggactggatagaaattattctaagatcgctgttcatattagtaggactttttattatcacaaaacttcttgggaaaaaacaattatcaaaactttcttattttgaatatattgtaggcattattatcggtgatatagcaggcagtttatcaatggatgttgaagcaagcttgcttcatggggttacgagtatccttatttggacactcatttctgtttttttaagctatatatcaatgaaaaataaaaaagtgagagatttcgtagaagggaaagcgagagtatttataaaggatgggaagatccttgaggagaacttgaagaaagagcgatttaccacagatgaattgctggaaatgcttcgtaaaaaaagcgtcttttccgcaagtgaagtcgagtttgcccttcttgaagcagatggagagcttagcgttttattaaaacgtgactatcgaacgattaagcctgctgaactttggctacacctccctcgtgataaagaaccaaaaacgcttattatggatggcgaaataataaaagaagtgctaacagaagtaggtcataatgaagtatggcttaaaaagattttgtcagataaacacgtacaaatagacgacatttttcttgcacagcttcactctgatggcaagttaacgcttgattattacgaagatggcatgttagaagttgaatagagtcatggaggaaaatcatgaaaaaagaattttcttatcgatcgaaggatgaactgatcgttcttcttttagatcgagggatttacaaagtaaagagtaaacagttatatgaatgttcgcaaacggaattgttttattattacctttccatcacaagggaatcattgcagcaggtaaaatcgaaggttagttcttaacagcttcttacaagaagctgttatttttttaggtgaatggacttatattaagggaatgttcgaatactgtaaagaacgctttaagaaagataaccaatgtttttgtctagttttgccgaaagccttcacaagccacagaatagtttggataatagagcttgtacttataagtagggaggggtggcgagccttgttatatgtaaagcaggatgcaaaagaagaattgctccattggattaagcgtaagcaagaggaaatgatcgagattggcactgcaaaaggtatttcacataaagaaacattacagtgtagtcaagagttagatgatttattaacttcttatcaacgtttgacctccgtcaaccaattgagaagttagcgtctgaatcgaatggaaaatggcttccttgacgactggtggataatcgttttggaattcagaaatacaatcacggatttgttgaattagtaggatctcctcatgactcgcatcgttcatctcaacatcctcctcataattcgatttatacaccaatcatgacaaatcaaactcgttttcgtcaatgcttttccttaaaaatcgttcgaatgatgtttaaaatttctttattttctgtaaaataaggacttattacctacttgatgtgcatgatatacataatgagcattaaatttctaaaaaaactttaatacaatgtttgaacaaatggcgcaaaaattatatactagaaaggacgggttttggtgcccaaagatttacgggtccaaacctctgtttatttctataccattcatttaacgtaaatgatgatttgattgataaaggaggtctagcaatgaaggaaggaatccatccaaaataccagcaagttgtatttttagacgttagtactggttttaagtttctaactggttctactatgggatctaacgaaacgattgagtgggaagacggtagcgaatatccactaatcaaagttgatattagttctgaatctcacccattctacactggtcagcagcgctttaacgatgctggtggtcgtgttgaaaagttcaaaaagaaatacaaccgctaataaaagtagaaaacactctgaggagtgttttctttttttaggcattaaattgtttccgtaatttagttatggcactttttctccacgatttaaccgcttctacactaacaccttcagcagttgcgacatttttaagtgattttccctctatgataacttgttcaacccattttctttgattcattgtaaggctatttaagtcaatgttaagcgttacgctgttctgaggcgtgaagaacgtttcttcatagtcattccaatcaacaacatgcgatgattctttagacgctcgtaattcttttcttctttcatcaagtaattttccgcgcacttttaaataagcatacgcggaaaagcttccttttgaatcttggtaattctgaacgcattcccaaagcgcaatcattgccgcttgttcatataagggatagttcattgtcaggtttagtttatagatttgactcttcactagtggcgagtaatctttaactattttttcaaatgagatatcttgcacaaaacgagtctcccaagagagggtgcaccctcctatattccgtcggtaaagatgacgatacgggaatcgaaggaaagtgtcatatacgtgatttgcaagtttggcgagacgagaaggtaggatacgtgttattccatttaaggagattatcagtttagtagatttaaataactcttaactgtttgtatagttccgattattatgccgttctgaatcagaacaaaataaaaaacgatctaaagtaagatcgttttcgcgggagaagacttatgcttttcggtagcaaagctgtgcgttaattccttttaattgaagttcgcgtacaatgcgtcttaactcttcttttgtcaggagcggctctttcacaatcttccacctccactaatttctaattactgatcaaggttcagtgagttaacgagggcagtcttgtatgagttaagttctgtgaatccttcaaattgatgtagcatccctttaaaaataaatctccgtggatttggctcattcacttctttcataagaaagtgaaccgtttcaagtagctctttccttttgttttcttttaccctcatcgtcttaatggtcgaagccatgttcgttaagatagaggatggtgactgcttttgacatccttccgtttgactgcttttttcaaaaatgacggaagcttgcttcatggttagaaaaggctcagcattgctttcgatcatgccattaaccatgtcatttaaccggtttagaatgaatcgaggaagctcttctaagtcaaaatccgcattctgcaggacaattaatttaatgtaagaagagaacataccatcaagaagcaggacgcaatctggcaaaataggggtgacgcgttcgccatataagtcctggatactacttgcaagcgtctgaatggactccattctaatcttcaaaatcagttcatcgatttctttgttcatcgaaatagcttgttccctgaattgcataataataaactctttatgctgcacgatttcttgagcttgcacatacagcaacttttcaagacgttcttctggggtaaaagaatctagttttgcatcagatagtttcttttttaatatctcataataataagaaaagatggagtatagtacgtcatcttttgattggaaatgaaggtaaacggctcctttagaaattccactttcattggcgatttcctgtatcgatgttgaatggaatccttttcgagcaaatagctgcatggccgcttcaaggatttgtttctttttttcgttcatcttccacctctgttcgtcagaaataaactgaccgggttttactgaccgattggtcatgaacattatatcacgttcaaagtttttttcctaatcctacttttacatagtattaatctctatatattaaacaatatatcttgaattatatcggtttattcagtatagtgatcatgtaatgaccagtcagtcataaaagtggagagaaaaaggagtggaagttgcttgagaaagctgattcaattttcgttaaataataagtttgcagtttggctgttaacgatcattatcacagttgctggattgtactcaggttttaatatgaaaatggagacaatcccaaatattaataccccattagtatcagtaacaactgtttacccgggagcaacacctgaagaagtgtcggagaaagtatcagaaccgattgaaaataaagtagaaagtctttctggagtaaatgtcgtaagttcttcttcatttgaaaatgcatcgaatgttcaaattgaatataactttagtaaaaatatggatgaggctgaggatgaagtacgagaaaccctgcaatcactttcattacctgatgaagtacaagacccgaatgtttcacgattaagttttaatgcatttccggtcatgtcgctaagtgtttctgaagatgaaagttcactaactgaattaacccagcgtgtcgaagaagacgtcctgcctgcaattgaaggggtcgaaggggtctcatctgtttcgattgccggccaagaagtggaagaaatttctttttcgtttaaagaagataagatgaaaaaattagggctagatgaagaaacagttaagaatctgattaaaggttcatctgtcaatatccctcttggtttatataactttgaagataaccaaaaagctgtcgtagttgatggcaatgtttcctcattagaagatttaaaagagctagaaataccagcaatgccacaacaaagtcaatcagaagatcaagcaccatcatcggcaggtgcaccccaagatccatctgcttctcaagcgggaggagggcagccgaaaataccaaccgttcagcttcaagaaatcgcagatgttgaattagttggggaagcggaatcgatttcccgtacgaacggtaaagaatcaattggcattcaagtaacaaagagtgcagatgcaaacacagttgacgtggttaacggtgttaaagacgaaattgcatcacttgaggatgagaataatgagatgagtattgtcactattttcgatcagggtgagccgatcgaagaatcagttagcacaatgctgaacaaagcgatcatcggtgctatttttgcagttctcattattttattattcttgcgtaacatacgatctacgttaatttccgttatttccataccattaagcttgctaattgctttattggtgttgaaccagttagacattacgttaaacatcatgacattaggtgcgatgactgttgcgattggtcgtgtggttgatgactcgattgtcgttattgaaaacatttatcgacggatggcaatcaaaggcgaacagttgaaaggtaaagaactcattacggaagcgacaaaagaaatgttccttccaatcatgtcttcgacaattgtaacaatcgctgtctttttaccactaggtctcgttcaaggaccagttggcgaattattcttaccttttgccttaactattgtatttgcgctattagcttctttacttgttgcaattacaatcgtgccagcgatggctcactctctctttaagaaagggttagttaaaaaaggaaaggaacctgagcacaaagaagagggcaatggccgtcttgctcatcaatacaaaaaaatattaaactggacgttaaatcataaactgatcacgttcggtgcgagtattcttgttttagtgggaagtttattccttgctccgatcgttggcgtcagcttcttgccttctgatcaagagaaaatgatcgtagcaacatataatccagagcctggtgaaacaactgaaaatattaataaccttgctcttgaagcggaagactacttcttagataaagaagatgtggataccattcaatactccgttggtggagaaaatccaatgaatccaggagctagtaatcaagttcttttctttgttagctatgatgaagagacagaaggatttgaagatgagcgtaaactggttcttgaagatttgaagcaactgagtgaaaagggtgaatggggctatcaggatatctcagcttctggtggaagcaaccaaattacactcgtagtcaatgaagaaaatatgggtgatcttggtccggttgtagaagatgtgacagctgtgcttgagaaagaagacgacctttcgaatattagctcaagtatttcagagtcctatgatcaatttacaattgtagcgaacgctgaaaagctaagcgaatttggtttaacagctggtcaagtcggaatggagcttcgtaatactggggaagcacctgttctcacaactgttgaaaaagatggagaagcattaaatgttgttctccaggtaaatgaaaagacttttgaagataaaagtgatttagaggaaacaacgattcagtcaccattaggtattgaagtaccacttagtgatgtcacaacaattgaagaaggtcaatcatcgaatacgattacacgtcgcgatggtaaagtgtatgcgaacgtaacagctgaagtactcgatgataacattgggcaggtttcggcagatgtccaggaagccattgatgaaatggatttacctgattcttcagaagttactcttggtggtgtaactcaggatatcaatgaatcattcactcagcttggtttagccatgctagccgcgattgccattgtttatcttgtacttgtcattacatttggaggcggtcttgctccgcttgcaatcttgttttcactaccgtttaccgttattggcggactcgttggattactaattgctggtgaaacgattagtatttcatcgctaataggaatgctaatgctaattggtattgttgtaacaaatgcgattgtattaattgaccgcgtcattcataaagaaaaagaaggattcacgactagagaagctttaatagaagccgctggtacgcgtcttcgtccgatcttaatgacagctcttgcaacaattggtgctttagcgccgcttgcgtttggtctagaaggtggagcgctaatttcaaaaggacttggtgtaaccgttattggaggactaacaagctcaactctcttaactcttatcatcgtccctgttgtttatgaattcttcatgaaatttagaaagaaaccgaaaagcgaatagaaactactaatggaggtctctttaaaaaagggcctccatttttcctttattatttttttaagatggcaaatttctgaacagtaatctattttagtaaaccaattatttttaccggctctggacatgtgtacaatctcccattttcgggaaacaatgaattaacgatgacgattaggagagacataacaatggataaagttgaaacaatgtatgtcgagtactttcacgagcgtcttgaagaaattggggagaagtggacaagaaggcttcaaattcttgtcgacgaaaaagaagcaacagatacggccgttcttaaagttccagaattaaaaaaggaaattattttgttctgttctgattttgttaagcagatgatttttcaaaaatcaaatagtcgagatgtacaggaatgggcaggaaggattgttgaaattttttcgagccacacgttttctttgcagcaatcagtagctagcctaacatatcttagacaaatactctgggatgttatggtggaattcagttcggagcagaaacatatagaagcgagccgactagcagggtggggcagttacatgaacaaatcgtttgatttgttgcttcataaagtaacggtctatacaaaccaactaaatgaagaacaaattgcggcacagcagacaaaaattaccgaactaagtgttcctattattccgatcgcaaaagatattggcgtattgcctcttatcggaacgattgatacttatcgcgcatcacttattcaacgaaaaggtatcgaacgaagctcagaacttcaattatcctatcttgtgattgatctatccggcgtcccgatcatggacacgatggtagcaaatgaaatctttcaactgatcaaaatgcttgagctgtccggggtggaatccattttaactggcattcgacctgaaattgctcaaacagccgttcagcttggtattgattttacaaacgtaaatacgtacgctcatcttcatcaagcgctaagagccattttaccttcttcttaagaaagattaaagcctcagaggaatgttcctctgaggctttatacgaggcatgtaaggtgagtatgaagacactgataatctccgtgtttaagaagaaagagagctaaaatataatggctatgctgttttaggatccctatgttgaagaaaaactgtttagaaagttctcgataaggtagtttctttgacttgaatattttcacaacaagtgtttcacttgccgcaagtttccaggctgcttctttgcacagattccgaacattgtcctcacttggcattttgtcagggagctttacaagagaaatacgaaagagacgaagttgttcctgatagcgaatgatttcattttgaagcaaataatcgacctttatcatgattcaaacacctggctactttccattagtttttaatgaacgaacgctgtaatgtgttgattatacgactaagccgtgtagcggtcaatgggcctattttggtaaaaaaagtgatcggcgttaggtatatagtatggttcttcaaaaagaacaatatgaacaatgatccagttcaaaaacttgtcattctcaaacaaaacctgaactatagttcaggttttgtttgagaatgtttttatattgtgctatttaacccaatttgtaagattacttaagtccgcgtaaatggaatcaggatgaagattaagctgttcaacgggcaagtcgttacgattaatccatgcagtatggaacccaaaattcttagcacctgatatatcccatccatttgatgacataaagagaatattttctcgacttaattcaagaaagttaagcgcatggttataagaggcaggtgtaggtttaaactgttttatatcatctgcactgatcacataatccaggtacttagcaagaggtgactgcttaacaagagggtcaagcatatcatgagacccgttcgagaaaatagcaagcgtgatgccttccgctttcaggtcttttaatacttgtggcacttcctcatacacggaaagttgctggtaagcttcaaacaagacttcttcgttatcttgagtaagctctgcacctgcttcctttacagcataacggagggcatcgcgcgtcacttgtgaaaatggttggtagttccccatcatttgacgtaaatagctgtactcaagttgcttctttcgccacgtttgactgatttgatcgcccttatttggataaagctcttcgcattttttagtaacagagaaaacatcaaataacgttccgtaggcatcaaatacaaaagctttcgcttgactcatatacatcctccttttgtccatttcagttaattccctcattattgtttagtaaaacctctcgaataatgatttgtatagacgattagactgatttcataatctttttttttagcaaaaatagttaaatggaccttagtattcggatggaacattgtaggaaaattatgctagactaaacgtagaaagttcttttgtggaggggcatatgaagagtgatggagaatcaaattggttaaaagattggggagcaccgcttttattcgctattatcctggcatttgtagttaaaatgtttgtaatggcaccgtacattgtggaaggggcttccatggatcctacgctacatgatggcgatcgcctccttgtgaataagtttatttcatatgttcaggtgagtcctgaacgaggagacatcattattattaaggacgaagatgcaaagaagcattatgttaagcgcgtaattgggttgcctggagatatcgttgaaatgaagcatgataagctttacgtgaatgaaaccgagttaaaagagccctacctggatgctaaccgcgatgatgcgaagacgatgggaatgaggttaacagaagattttggacctgttgaagttcctgaaggtcagctatttgtgatgggggataatcggttaagaagcatggatagtcggaatggacttggaaaaatagaacttgaagaagttgtcggaaaggcggaagtggtctggtatccgtttcaagatgtaagaccgacgaagtaagaaaagaggaagggcatcgcgctcttcctctttttgttacggttttgaaatacttgaaacaaaacgttaatggttcttgtttccctaaaatgtggaactattaccattctgcaaaaaagtgtttgccgtaatgaaatggcttctaagccttgatatgaaaggttttataagtctgatttcacctattaaccggaaagtgcctctggtatggattaccggtaaaggaagttattacggtcttttagactagcaatcttgtgatattctcttcatgtaagaaatttcaccaatcagggaggaatcacattgaaaaaatcaattattctaggtgtcacagcggcagcagccctgctggcagcaaatccatcagcaagttctgcaagcgaaggaaatcaattcgcaaatgcggaggttaagactcaaactttccaggtcaacaataaaaatgaacttcaatccattattgaccgttttgagaaacaatacaatatctcaattaacgaatctattaatttagatcagcttcttcaacaagaaggcatgatgaagcaggcgcctgaaaagcaagctgaacaagcgcctaaagcagaagcgccagtagaagaaaaggcagaagcgcctgaagcgaaagcaccggtagaagaaaaggcagaagcgcctgaagcggaagcaccagtagaagaaaagacagaagcgcctgcagaaacagaggcagtcccttcagagtcaaagcaagctgaacaagccgagcctacaaaagaaacagaagctgacactggactatcagaatttgagcagcaagttgtgaaccttacaaatgaagagcgcgcaaaagctggtctacctgcacttgaagtagatactgagcttagtaaagtggcacaggcaaaatctgaagatatgagagacaataactactttgcccacaacagcccgacttacggatcaccatttgatatgatgaatcaatttggtgtggactatcaatcagctggtgaaaacatcgcaaaagggcaacaaacgcctgaagaagttgtcaatgcatggatgaacagtgaaggtcaccgtaaaaacattatgaacggtagctttactcacattggtgttggctatgtagaagaaggcaacatctggacgcaacaattcattggtaaataacatgtaaatcgagcccatccttcttaaggatgggcttgttttatttgatgaaaggttgagttttcttatttggctctcttcgtagatattgttgcttttagataagtggttaacttccgctcgtcccgcaggagtcgagcatccttccgctacaattagcgaagtgtggttttttattcaataattgattcaaaagcaacaatctattagaaaagagcctattaattttgacgttctcgttcgttcttcttaatgattttactagcttcgcgtttactaagaggtgctagaggatattcttcgataaaattctttacagtactaggggctgttttggagtattctctaagagcccaaccaatcgctttttggatgaaaaattcttttgattcagaatggacaagaatagaacgtttcaagagtggccagtctgtcttttccttatatgaattttgaaaaaggatagcgcttcgatttagccacatgttctcgcttgtcatccacttttctgaaataaagtagatttcatctgggtgttgcttaaaataatttcccgcactgtgaaccgcaagactatcaactgtatcccaccaggattttgtgacaattagctgctcaatgagagcaatggcgtctttcggaaactgtttgacacgaccgagtaaatcaagtgcagcattttggtattctcgttctggtaataaccagagctgttcaactaaatgctgaatgacttggaaacccggctctcgagtttggcctaacgcggttatgactgcttttcttctctcgggcgttttaactccgagaaaagggaattgatttcgcatatacttttccatctttacagcttgatccttatcttgaaatgattcgagttcttcttgtagcttttcaactgtaagcatttgctctctcctttctataagaagtttgttcgttgaaagacgcttcatttcctgtatataagccaaaagaaaaagcagcggcatggccactgctttttcaaactaaaataaggaggtttcccgggggagggaagggatgcattattttactatacgttggattccaggaaagctttccgggttgaggagaaagcttttctggattgactttagtatagcaggcctcattaaaaaaatgagcattatgggatagttttgataagaatgacagaattgtgaacgaaatgtaagcagattaagttgctggatttgaaagaacagctaggtctgttaatgcattatgaagactagatttaattgttagcttatgaagatcgattcctaactgaacggctgaaattgagatcgatggactgatgcctgttaatgtaacctgaacgcccataagacttaatgcttcggtaatatcaaacaagtgcttggcaaccatcgtatccattgtcacaacccctgataagtcaataatcatgtgattaagctgcaatttgcgcgtgtgttctagcgttttctccatgatgagcgttgcccgataagtatcaatatttccaacaagcggaagaattgccaggttttttataattggaataattggagttgatagttcttcaagggttgagtcatatttgtttttaagctgttgattgcttgtaatataagtactcccatagctataaacaaattgatcaagaagtggatcgatttttccaggaagcttaataacgtcccgtggcttcatgtttagctcttcaacaacgggctcaatggcttcccaaattgcctcgcgaatgagcggtactgtaacgattagcgagatgatcatctcattttcatcttgaacgagctcactagattcttctccaaactcttcaattgcagtcatcgcattcgttgtattttgctgcaggcttttaccaatcaatttaactaaataagtcgtattcgttaaagataattttgtttcattcgtaaaatcagcttcatccagatcatgacgctgtctttcgtatgtactctgtgcaatctcagatgcttgttcaagaatgtagcttcctactttttgagtgggtgtctcagcagtcactttattgcctcccttaaggtagctctataaacaaaacgtgttaacgtcaataaaacttgaaattgaacagttaacacgtgtaagtaacagagttctgtcatatataaatcataccatttaagtagatcgtttgtttattaaacgtgcattctagtttaaaacaggtgtgaatcgctcgtgaaatgctttgtatttactagaaatactagatggagatgttccgtattttttagcaagggcgctttgactaatcgataaatcaaagactttagaggcaaggtactcaagagaagctgcaaaaatagcaggttttctgacagatggctgttcttcttgaatatactccttccagaagtgaaggatttcttgaacctgttcttttgaaaaatcatcactgacgtgctcagtaaagagagaagccacttcagcatcttcttttctagaccaaatcatgtcaatcgaatcatctgtttcttcagatccattaccatgcttcacaatttcactaagaatttccgggaagtcgctttgcatcatggagcgtacgttgttagcggtgtcttcagttgctaatttcttttctaccaattgcattgcgtcaggggcaattttaagaagttcgataaatggcatcgcaccgtttttcactggaagaagaataccagctaggctttctccttttgatagaatcacttcttcatgcaataaaatgctgataggttgatttgagctaagctctgtcacaacagctgtgttgcccgatacttcttcaacagtataaatggacatataagcatcacgccagtcgttcactgtttctttcactttctcagtagagaaggtgtgggagtagagttgaatgtactccttcacgatggttttattccactgattgacagcctgatggaaaatcgcccacgggaaaataccatgcatataagcttcttcaaggtttttaggaatatcaaatctagtaaataactcatttgctaaggaaaccatcttttgatcatggtggctcatcgcgtattcaacaagctgagcttgaacagtgtaaagttcttgagtgtatagctgttcttctaaatgatcctgtgcactttcagatgtcatacagcattttttatattttttgccgctgccacaaggacagggatcgtttcgtttcgttttttgcaatgttgcttcctccttcaggtcaaacttattcaacaataagagacgaatgatattttagcatacaaagggttgaaagcacaaaaaatagataaaaagacctacttttatttgaagttttccgaaagaccatcactaagaagcattactatttttcgggaaaagtatggttactttcgttccaattccaacctcgcttataaaatcgatggttccatgatgattctcgattattttaaagctggataaaaggccaagaccggtgccttcttctttcgtcgtatagaatggttcaccgagcgttttaagtttatgcgcaggtattccaacaccttcatccgttaaagtcacttctatatcagcatcttttacgtctgtttttaaggtgacactaccaccttcgggcattgcttcaatcgcatttttaattaaattgatgaaaacttgtttaagctgattctcctcaccgtaaagcgtattgtcttgatcggtgaagtctttcataaacgtaatattgtaaaggcttgcctgcgtacttaataactgcaatacataggaaagcagctcgttcaccttgaaataagtaaaatgagaagcttggggttttgctaacacaagcaggtctttaatgatggcgtccatgcgatcgatttctgaaagcataattgaaagaaacggcgttttctctgcgaatggtttatcgtcgtttagcaactgaataaatcctttaacggaagttagcggatttcgtatttcatgcgctacgctggcagctaactgaccaactgccgataatttttctgttttgagaagagcttcttccgttttctttttatccgtaatatccatgaaagcggccataatcccattaatttgaccgttctcatcttgaataggagctgtggatagagctgtgtgaacgatcgagccgtcttttgtcatccgcttaacttccttattcacaatatggccgtgttcaatgatttcaggtatcgtgatatctttttcatctttaggtacaattggactcttctttcctattacttcatcactatgccagccaaatatttgttctgcagctgggttccaaagacgaatgttcgcattcatatccagtgcgagcgttgcaattggcgaggcacttataatggcctgaatcaattgttttgcttcccatagttcttttaccgcttgctttcgttcggtaatgtcacgtgtttgaatgatggtcatcactttattatcaaaagtgatcggaataagggttgattctacgtcaattatttcgttattcgagcgcaaaagctgatattcaatcgtttcacggacttcatttttgttagtatgaatgctgtgtaatatttctttaattttcttttgatcctgttggtttacgactagggattcgcgatttcgataaaggtcactgagtgaatgaaaacctgccatatcaagaccagtttgatttgtataagtaatctccccatcgcgaagtaaacatatcgcatagggggatgactcaacaagacgtctgtatcgttcttcactttctagaagttggctttccatctccttgtttttttggaggagatgttttaagagaaaatagagaaagatacacgttaataagatgaaaaaccaacctttatataatcccatttctttgtttgttataaaatcagtagaaaagcgataaagaatggtatctgaaagtaagatccatattgagccaaacagaaaatagctactaatgataatccatggaattgattctgtttttatatgcaagagtttttgtcctttctctatatcctcagtttgtattttacaaatttgatggacgaatgcaaagaatgcttgaagaatggaaaaatatttaggtagaaagtaataagaaagaatggtacatttatagctagggttaacgcaaagtgacatgtttagccatttatcagcaatgattgaccgtcgatctttatgattatgatgcgaatggtctataaataacgagtgaagatttatattgaaggagataaaatttctatgaatgaagaccaaatggaacctcgaagtcgatataaacctaagaaaaaacgccgtggattgcgcattacactcttgctattattatttattatagtcggtattggtggttatgggggatatctttattataaagtatctagcgtatctgaccaatctttgatgaaaccaaatcggggagatcagtccgacctaagaaacagtgcagtcgatataggtaaagatcatttttcagtattattattaggtgtagacgatgaagaaaatacatcgaatggtcgaagtgactcgatgatggttgctacatttaatcaagatgataaatcaatgaagcttcttagtatcccacgtgactcatatgttgaaattccaggtagaggaatggacaaaattactcacgctcatgcctatggtgggattgatttaacgattgatacagtggaaggtttacttggaattccgattgatgaggttgtacgagtgaattttgatgcttttaaaaccgtcattgatgagctcggtggtattgatgttacaattgattcacagcttgtcgctgaccaactgtacaaagaatctaaagggaaaatcgatttagaagttggggagcagacacttaatggtaaagaggcgcttgcatttgctagaacacgtaaagccgactctgacttaaaacgcggtcagcgtcaaatggaagtcattactgctgcgatggacaaggttagctcactttcttctataccgaagtacggtgatgttgtcgatcgtatcggagagaaccttacgatgagctttacttttaatgaagcaattggcctgtatccgtttatctcaaagattgatacagttgaaaaacttcagctaacaggaacggatttccaacccgctggaacctactattttaagcttgatgatcagtctttagcaactgctaaaacagagctaaagtctcatttaaaccttgaggatcaaaataatgatccaaatggaaatatgaatgcattagacggtgaacaaggtgagacgccttaacattagatgaaatgatacgaaaaggagcagacgcaatgtctgctccttttcgttatgaaggatggttacagcagaagattatagggaaagggtctaaagaatgtaagaaaggggttaacgaaatggctggattatcatttattaaaaaacttgggaaagaaatcggcgaggatcgggttacgagccttgcagctgaattggcctattactttatgttatcgatctttccattgcttattctcattctctcgattcttccttacttgtcaattgacaaacaggaagcggtggatttccttacaaaatatgctcctggagagactgggagcatcctacaggataatgtcctctccatcattagcgagcctcagggcggcttattaaccttaggtatacttgggacaatctggtctgcttcaaacggcatgatggcattaatgagagcattgaaccttgcgtatgatgtagaggaaacaagatcatttataaaagcaagacttctctccatacttttgacaatagggcttgttcttgtttttattgtaacgcttgttttaccggtttttggagacgttattattgatgcagtaacctcagctcttaatctgccgagctcgacggaatttatgtttcgtatcctacgttgggttgtagctgttgcaatcatggcatgcatacttgctgcgttataccgatttgcaccaaataaacatttcctatttaaagaagttattattggagctcttgtagcgacattaggctggcaggtaatttcacttgcatttgcattttacattagtaatttcggtaactattctgctacttatggaagtcttggcggtgtgattattttaatgctttggttttatttaaccggcattattcttctcgtaggtggagaggttaatgcactacttcataaaaacaaaaaaacatcggtttcaagtgagaaagagcaagttggattttaaactggatggagtaagggcaattgaattgagaaggttgtaccaaacaaaggagaactttttacttttatcgtgcctttgtggttttgaataatttgtttactaaggaacaggccaaggcccgttcctttttcttttgttgtgtaaaagggtttgaaaatacggctctgagtcgatgcattcattccaacgccattgtcacggatattgatcgtcacaccattaagatgttgtcctactgttaatgagattatcccattgctacggttcgtcatgcgaatggcttcgatactgtttttcataacatttagaaaaacttgctttaactggccaggattgatcatcacttcaatagggagattgaactgttgcagatttgtggttaggtcacacttgcttaactttgcctggctatgaaaaagaagaaggatatttttaagaaatgggataagatcagtacgttctgatgtaagctctgaaggtcgtgcaagttgaagaaactcttcaactagatctgttgttcgttggatttcttctaacagtagatcagcaatgtcgcttttttgtagtttatcaaggtcaggttttataagctgaaggaagcctttcataatcgtaagaggatttttgatttcatgggcaacgcccgcaacaagcgtatgaacgttggttagtgcttgattttcataagctaacgcttctaattgctgaagcttgtgataatagtcctctactgatggcaatatattctgtttaggaacttccttagcatttaaattaggctgttccaagtccgttacccctttcgttaacttattcttaacgcataattatagagtaacatccatgaattgcgaagattgaatgtttgtaggaaagaattagagtgtttttgatgaatattgtttgattttggtataaaaaagaatctgccctcggcagattcttttgggattaggcaggttgatagcctgcttcttcaattgtttgtatgattgttgcttggtctacggcttcttcatcaaacataattgtgaccgtttcttctttgagatcagctagagcccgttcaatgccgtttaaagaaaggagggcagcttcgattttctggatacattcttcgcccttcattcctgctacggatacagtcatttcattcatataactaaactcctttcatcatctaaaaccctttacccgaattaagaggagtttaatctgtcgtaataggctaaggcttattcggagtttcgttcgaaagctgttctaatgatttgattttaccatgtggattttgtgcttcttttcttttgcgaaattgtctttctcgttgtcctttagactgactcatgagtttttcaccccttatcatagtgttcattaataaggtggcctccagaataaaatgtactcactgcaaattttgggagtaaagttgaacaaatgtgtacccctttttctgtaaggcgggtatcgcttttttcactccttctgccgtcccgctagtcggttgattcatatgaagaagggcaatgtcgccgggttgtgcttgcattagagcatcgttcacctgttgggcggtaaaagttgcgcctgcatctccaagtattgtgtaattcacaatttgaacaccaagatcctgagcgatttgaactgctacgtcatcatagtaggctgttcctgaacggaaaagtgtcggtgtttcacctgttagttcttcaattttcttttgattctctttcatttcttcaatcacttctttaaccgatgctgtccctgtgatgccccaggctgactccccgttcacagaaagaggcttgtgatgcgtgccgtgattttcaatttgaaagagcgggtcatgagcaagttcttggaacaaggcggtgttttgatcaatccatctgctgttaataaaaagggtggaaggcaggttgttttcttttaaaaatgcgatcaacgcctcatcaacaccatttccatgagacccaccacaagcatcaaatgttaaggcgatttcctttttggatgaactaaaatgagtgtagacacctgttacattttcaccaaattcagttggtgttttgttttcgtattttgcaattagctgctccttgtcattttcaacaagaaaagaaggaacgggtcttttcacattcgattcattaagaagagagaggttaccagcttgttgcacctgacatcccaatagaacgaagaaaataagtataaaaccagtttgttttactgttgtcatatttatcaccagcacttagcatatcatagaaaagataggatgaaatggaaaaaacctccttgaatgaagatcaaggaggtttgtagatcattcttactctctagatggtgtgtaagaaaaagtttataaaaaacaggcttgcgataatgtacatcggtacaggaacttcttttcctttacctaaagcgatttttagaaatgggtatgcaataaagccaaatgcaatgccgtccacaatgctgtaggtgagcggaatcattacgataattaaaaatgcaggaaacccttcagaaaaatcttgtagggaaatattttgaatggatgtaatcatcagaccgccaataataatcaaaactggcgcaatcgccgagtctggtatgattttaaaaatagggataaagaataatgatgttaagaacaataaccctgttgtaatagcagtaagccctgttcgaccaccagctgaaattcctgaagcactttcaacagtcgagacggttggactcgtaccaaaaaggccagatgatatggctgagatcgcgtttgcttgatatgacttagtaaatttccgctgatctggcagtaaaccggttaacaaacccatattctcaaagacaagaatcatcgccattgagaacgttgcgatccagaatggcagcatcagaatgtcatcgaaagacatggcagcatataccgatccgtaggatgagaatgaaaagttattttgttgccctgtctcaattagtccgagcgaccaagcgagtgcagttccagctaacatgctgataagaaaatgacctttcacatttcgaatgaagagaatggcagctaaccctagcgtagcgagggttgcaatcacatgagcggacccaaggctcccaagtgctacaaatgtggaatcgctagaaacgacgataccgcctttttgtagtccgatgaatgtaaggaataaaccaattccgacggtaatcgcttcttttaatgaacgcgggattgcttttgaaagcacaccggagagcggtgtaaaagctgttatcgcaaataatatccctgcaacaaagacagaagcgagcgccacctcccagcttaatcccattgattcaaccattgtatacgtaaagaaagcatttacacccatccccggaacgaggataattggtgcatttgcataaaacccaattaacaggcagccgaccactgacgtcaggactgttgcaatcattcctgcttcgaaaggaattcctgcatcagcaaggattgacgcgttaaccgctgcgatataaacaatcgtaaaaaatgatgtaatgccggcaagaatttctttcttcagtgaagtatcgtgagcctgaaaatcaaaattaattttcgttttcactttattcccttcttacttgtgtttccctctcccacccgtgtatttgaaaaatcaaatcaccaataaaatagtatatcagagcaagggatgtttttatagtggaaaaatacgtaatgacctccgtggatcgctttgataagatgaaggtgtgtacataattcgttttgatgaaagaaggcttttacatgcgtaatacgttatccgcccttcaatgggccatctttatgattgcgggttccatcgtggcgccggttgccattgcaagcttgttccatctagatcctgcgatggcagcagggtttgttcagagaacgatgtttgttctgggtgtagctggaatcttacaggcgacgctcggtcaccgcctaccgattaatgaaggacctgcaggattatggtggggagtatttgttctttatgcagggttaagttctactttatttggatctgaggtagagacacttcaagcgctcgaactcgcaatgatcgcaagcgggattatttttatcctactgagcgcatttggtttagtggagaagctatctcgtctatttacaccagttgtaacagggatttatcttctgcttcttgtcgctcaattaagtggatcctttcttaacggcatgatgggagtcggctatctaaaagaggggattgaccttcgtatagcagggctatctcttctgcttgtagttgtttccatatggttttctaggtcgatgcctgcgatgattcagcaatatagtatcctcattatcttaattttcggttggattttatttgctgttcttgggttagcgaagccagtcgttcttccagaaggaggattcattcaattgccagaggtattcgcgtttgggtatccagcctgggattctggcatgattataacagcgttgcttgtgacgcttcttcttcttacgaatatgatcgcaagcattcgcgttgtagaagaagtgttaaataagctatcaaatacaaagcctatggggcgatacagacaggcaggattcatttctgggatcaatcaattactaggaggcgtattttcagcggttgggagtgttccgatttcaggtgccgcaggttttattttaacaacaggtcttaaacaaaagcttccatttattttaggtagtggtttgatcatcattattagcttattccctgctttgatggcgttctttgcggcattacctgaaccagttggctatgctgttatttttatcgtgtttgttaacatggtaggaattgcatttaacgagtttaaaaaggatgattccgagggaaaaccatttataataggcatttccttcatggttggaattggtacgatgtttattccacctgaagcctttcaacaagccccgccaattgcggcttcgattttgaataacggtcttatacttggttcgattaccgcgattttgacggagcaaatcctttacaaaaagcaatagaaggaaacgcctattcgtgatgaatgtcacaggactagttccatcctcgtggtagtatgaaagtagattaggagaggagaatgttgagatgaaaaaatacaataaaatccttgttgcatttgatgggtcagacttaagtgttaaggcattaaatgaagcgattgccatggcaaaagaaaatgaatccatggaaattgatattgtgactgctttaaatccaacagctcagattagctccgccctcgtttatgctagcatattgaatgaactgagaagagaagcagttcagatgttagaagggataagtgaaaagctgaccgtacagctacccaatcacaaaataaagacgaaggtgcttgaagggaatcctggaaatgaaattgtaaaatatgctgatgatcaccagcgggatttaattattatgggaagcagaggtttgaatggcttaagagaatggtttcttggaagcgtcagtcatgctgtgcttcagcaatctcattgtccggttcttatcgttaaataaagaaagcatgcccggcataaatggccgggcgcttttttagttttcaacatatgtaatattattgtcttggccgatgatcgccttcgctgcataaccaataaatagcccattttcaactactcctggaagttgattaaggtgatcatgtagagtagttgggaagctaatttcaccaaataaacaatctacaatatagttcccgttgtctgttataaaaagggaatcattctctttacgaaggtttgcttcacaacccaaattttgaatggcgtttaacgtttttaaataaccaaattgcgtgatctcaacaggaagagggaatgtccccagttttttaacatacttactggaatcagcaacgacaatcatgtgcgttgaatgataggcgatgattttttctcgaagcagtgcgccgcctcccccttttatgagggttaaatcctccgttagttcatctgccccatcaatcgttaagtcgatggtagaaacgtcctctagtgataaaagtggaatgccttgttcctgtgcaagcttttcagtacttttagatgtggcaactcctgtaatattcaagccttctttcaccattctggctatttcaagaatcgtccaataaacggtacttcctgtaccgagtccaacaatcataccgtcttgaatataggatgctgcttttttaccggcaagttgtttttcgttcacaatccattcactcctccattatttcaattatctcattaagtataatcgttatatggagagtttcccaatgatgaattttgaaaacgccttctttgctgtaaacaaagggttagtataaaaaaaggatgaaaagaattattacgaaatcgattcttttcatccttttttctagttgctaatctttgcacggttacgtggaaagacgtataatgcatactgtcaggctgtacgcgtgactagcttaatgacaggtgcacatactaaaaagtattacttctgtaatcaaatgagttcgcgtcagtgggttcatgaaaacaagaaatgagctggagggaataagatgtcaaaacaacaaattggtgtaattgggttagccgttatggggaagaaccttgcgatgaatatcgaaagtcgcggctattccgtttcagtgtacaatcgctcggaagaaaaaacgaaagaaatgatgtctgaagttgaaggacgaaactttcaggatacatacagcattgaagagttcgttcaatcacttgaaacacctagaaaaatcttgctaatggttaaagcaggtatgccaacagattcaaccattgatcagttgcttccacatcttgataaagatgatattatcattgacggcgggaatgctttctttaaagacacgcagaagcgtagcgaagatttgaaagaaaaaggtattcgctttattggtactggcgtttcaggtggggaagaaggtgcattaaacggtccttcgattatgcctggtggacaaccggatgcatttagtgaagttgaagatatctttaaagcaatcgcagcaaacgttgatggcgatccttgtacaacttacattggtccagacggcgctggtcattatgtgaaaatggtgcataacggcatcgagtatggtgacatgcagttaatcggcgaagcttattacatgatgaagaacgtgcttggtctttcaactgatgaacttcacgaagtatttaaagaatggaataaaggtgagcttgatagctacctaatcgaaatcacagcagatatctttacgaagaaagatcctgaaacagggaaagctcttgttgatgtgattcttgatacagctggtcagaaaggtactggtaaatggacaagccagagtgccctagatcttggtgtaccactttcaatcattacggaatctgttttctcccgctttatttctgcaatgaaagaagagcgcgtgaaagcaagcaagcttcttgcgggacctaatgtaccagcgtttgatggtaataaagaagacctaatcgagaagatccgcaaagcgctatatttaagtaaaatttgttcatacgctcaaggcttcgctcaaatgcgttcggcttcagatgagtatgactggaatcttgattacggttcaatcgcaatgatcttccgcggtggttgcattattcgtgcaggtttccttcaaaacattaaagaagcatacgaccgtgagcctagcttaacaaaccttcttctagatccttacttcaaagagatcgttgaatcttaccagagcgctgctcgtgatatcgtatcacttgccgtacagcgcggaattccggttcctggtcttgcaagtgcgattgcttattatgatagctatcgtagcgaaacattgccagcaaaccttctacaagcacagcgcgactactttggcgctcatacgtatcaacgaattgaccgcgaaggcgtattccacacagaatggcttgaagactaatagaaaagcggagtgtgcccgtttaaatccgtaggatgttggagccctatcgaattagacgttttttgtctcaatcgatagggcgaaacagccggaggatttggcacgcgcagctagacaagaaaagcggaagcgcccgtttagcctcgacaagcgctggagtcccataaaaagaacatgttctttgtgtcagagcgagaagtgaccatgtctgagtccttccgctaaacatcattaaaaaacgctactcactccccgttcaaaggggagtggagtagcgtttttttagctaagccttgtggttaagatcattgaaaacctttttcccgaactgaatgacctgaagtaaacaaccaatgatgataacaaggaagcttacgtaaatcagtgaccatttaatcgatgtgaaaaatggtgcacaccaggcaaagagtgaaaagctacgtggataaaagaacatgataagtgaggttgcgatgttttctaagtagtcgaaaatgacaccaaatgagggaagtaagcttaagaataaccattttccattcgtgactgatcgatataagatcgtaattgaagtgattaaaaagaaccaatacacaagcggccagataaggtcaaaactaaagcgttctttaatgtaatagcttctcccggcttctccatatgcttctgcaacgtcatagagcttctccggagtgtaaaagaatgagccatcaggggattcagtcgtttgggtgatctcataagatttgttcgaaacttgagggaggacaaaggtaaggaagagtgcaaaaatgacgacagaaatgaaccagatcgttggcgttatacgagaacgaagctttagaaattgtaatttcatcagtacctccactcgttttttgactgtcatctcgaggtataatgaaagccagggggggtaccctggcttatgcaatcttatgcttcttttaatccttcgaataataaaacgcgagcgggtgatgcatctgttccctgaagttttaaaggtgcagcaaccatgaagtattctccagctgccacgtcttttaggcgtaagccttccatgatgataacatccttctcaaataaagagcggtgtgtagggtgctcaggctggctacgttcgataccaaggccgtctacgccaactccgcgaatgtttcgctctgcaagatagcgtgcagcgtcttcacctacaaaaacaaagtcaaaattaaattcttcttcgaaagagttttgagatttgaaaaggataaagtctccttcttgaatgtcttccgattcaatatccttgtcagagatagcgccttttacatctgttacgtcaattactttggctttaccaactagatcttcttgattaatcgattcaaacgttgctccatcattcatcatatgaagcggtgcatctacgtgagtgcccgtatgtacatcgagagaaaggcgagactctgttacatgtccatttgtcgtcgtgttgatttcaggttgtttttcttctttgttcttataaacagccattccattaaaaattggtgcacttacatcatacattttcataaaaaaaacacttcctttcaaatagtagtgtatatgataaagaaagatacgtgaagcacgtatctttcttttgtcatttttaattgcaataaactgctcgtcttcgctttacgtgagatccagctgcagtgagcagacactcggtcactttcgctttaccgtgctagctacgactcgcagaaactacgatatttcactctttcataggaacacaaacaccgtgttcccattcaagagttccaatatctccgtttctaaacgctcgtcttcgctttacgtgagatctagctgcagtgagcagggtctcgatcgcttcaccacatcaaatgaacacaaaagacgtgttcttttgatgcgcctccagcgcttgtcgaccctaaacgctcacttccgctttactctttaggtaaaggccaccagtggaggttgtctttttctagaagctcatctgcagcttttggtcccattgaacctgctggatagttcgggaattctttttccttctcatttgcccatgtgaccgaaatcgggtcaatgaactgccatgagagagcgacttcatcccaacgtgcaaagttcgtagcatcaccgcgcatcacgtcgtgtaggaggcgttcatacgcttctggtgagttcatattgttttcttgatggttattgaaggttaactgaattggcgttgttttacgcatatctcctgtatccttcgcattcaagtgaagggtgatgccttcttcaggttgaatgtggataacgagaatattcggtccaagtttaccactttcatttttataaagattcattggcaagtctttaaactcaactagtattttagtggacttatttgtcatacgtttacccgtacgaatatagaacggtacacctgcccagcggaaattatcaatcatcagttttgccgcaacaaatgtttccgtatttgattcttcatccacattatcttcttcacgatagcctggtaatgtttctccatttacttcgccttgcttgtattgaccacgaacgaagtagtcgtttacttcttccggtttaacagcacgaagcgcgcgaagtactttcaccttctcaccgcgaatctcttctgttgaaaggctaacaggcggttccatcgctagaagtgaaaccatttgaagcacgtgattttgaaccatgtcacgaagggcaccagacttttcgtaatatcctccacgtgtttcaacaccgacagtttcgctagaggtaatttggatatttgatatgtggcgactgttccatagtggttcaaacatcgaattggcgaaacgaatggcttcgatattttgcaccatttcttttcctaagtagtgatcaatacggtaaacttcatcttcagagaagacttgacgaatttcatcattcagcttttgagctgatgggaaattgtggccaaaaggtttttcaataacaagacgattaaagccgtctccatttgttaaaccttcagaatctagatttagtgcaattgttccaaagaattccggagccatcgccatataaaaaatgcgatttcctggaatattaaacttctcatcgagtgattgtgttaattcatttaattcctggtaagattctttctttgtaacatcaaatggttggtagaagaaatgactgctaaattcctcgtgcttgtcatctttatccatgcatgctgtatgtataacagaatcatgaacatttgaacggaattcttcgttggtaagctgtcttcttgctactcccactacagcgaaatcctcagcaagtacacctttacaatagaggttatacagtgatgggaatagcttgcgtttggcaagatctcctgttgcaccgaatataacgataacagaagcctgttttgatggttgattcatctttgtgacctcactttttcattattgctgttccagagggaacgtatggaaggaacagtgaattcctacttcatcagtaaagataagaccaatcaaatgctgatcagatgatatcgatcccgtaacagaactagttaccgggttcccaagtaaaaattttatagctttttcgcggtaaaatcaaatagtgtgattgggtatcaagctgaatttttaatattaaatcgactatttgaaatctgtaagcgataccatgattagtaccttgggaaaaggatcgtaaggacatttgaacggaaaaggataaactttttcctgagagatagaatggttgcattcaattgtggcgaatatagtagataggagcgttaatagggaggatgaataagatgattcgagtactgacaatcttcttcctgttttttggcattattctagggtgtgcaattgagaagccgcaaaatttaggcgaagtagaagccgatcgtccagcatctgtacaaagcattgttatgaaaaaagcgtatctcgttttaaatgctttaagagaacaagagatggacaaagtatctcgttatgttcatccacaaaaaggggtactgctttctccatttggaacggttgataaaaatcgtgcacaggtattgatgccttctcaggtgaaagagttattccgggtacccaatcaaaagcagcttgaatgggggacggatgacggtaaaggagatccaattcgactgacacctcaagcttattttgaaaaatatgtttatgatgtcgaatttagtgagactgagttagttacgtacgatgggatatataaagagacaaatcgtattcaaaatatagatgaagcttttccaaatagccattatgttgagttctttgtacctggatcggaagaaaatgaaggaatggattggaagagtcttaaattggtgttttctgaacataataacgatcactatttagttgggattgttcatgatcaatggtcaccttaatgtgaacaaaacgtgtcacgaaatggaattttacgtgtgagatgtgtcacataggttgctcatttagagaaactttcttatccttaaaaggtagattaatgtgataaggagaagaatttgtatgagtgatgtaaaacaacggaattatacaccatggatcgttgggctatccattgcagttaacgtgctcgttgttatcctgtttttcctacccgaatacagcggtgaggtaggatttgatattacgcttttgcctttgcttaacgcagtttttaatagctttacttttgttttcttagtagctgcgctgatctttattaagcaaaagaatattaagttgcacaagcgctttatttttgccgcctttacaacgacagcgttatttttagtttcttatgtaacgtatcacggattgtctgaatccacttcttttggaggagaaggactgatacgatccgtctatttctttattttgatttcacatattatccttgcggctgcgattgttcctcttgctttaatcacagttacgcgcggccttaatatgcaagttgcaaaacataggaaaattgcaagatggacgatgccgatctggttgtatgtgagtatgacaggtgttgtcgtttatttgatgatttctccgtactattgataggttgaaaaaacaggcaaatgcctgtttttttatttggattaatagctgcatggcatgggggagttggggagagactaccgatatgtgaatggatgtggcatatcctctcatcttatgctacttttgatagtgaacgtatttattcaaggaggtacgattatgagtgttcatattggtgcgaaacaaggagatattgcggaaacgattttattacccggagatccgcttcgtgcgaagtacattgcagaaacgttcttagaagacgttgtctgctataacgaagtaagaggaatgcttggatacactggtacatataaaggggaaagaatttctgttcagggaaccggtatgggcgtgccgtcgatttcgatctacgtgaatgagcttattcaaagctatggcgtaaagaatttgattcgagttggcacatgtggcgcgttgaagaaagaagtgaaagtaagagacgtcattcttgcgatgagtgccacttctgattctggtgtaaaccgtcttcaatttaatggcatggattttgccccaacagctgattttaacctattaaaaaatgcttatgatgctgcatccgaaaaagaaatgagtgttcatgtagggaatgtgtttacaagtgattccttctatcgtgacaacccggaaattttccaacagcttgctgactatcaagtgctaggtgttgaaatggaaacttccgctctttatacgatcgctgcaaaatatggcgtgaatgcactgaccgtactgactgttagtgatcatattgtaacgggcgaagaaacgacttctgaagagcgtcaaacaacgtttaaagaaatgatgattatcgctctggaagcggctttaaaacaaaagtaaaacatgggagaagacgagcgtaaagctggtcttcttttttggctatacgtgatttttggtgaggcgagttccactctgctaaaagttttcagctccttgggagtatgggcatatttttcttgatttatgaatccaacgtttacaacttggacggtcaaaaatacaggcatgttttattagttaataagcgattcctacgcgttttgcgatatgattcctttcaatgagttcttgatacacataattagccgtgtctccagttgaaatttcttttccatcttcaggaagataattttcttcaatccggtaatgaccacgagcctctccttctggtaagtaggttgggcatataatggtccactccatactgcttttattcagcatctcgtagacagcgagatgctctcttgctgctcgggttgttttacgttttgattcggaagactcaaaacgataaatgctaggatcggtacggctgtttagtatacctgctgtaccaactgtaatgatgcgctttattccctgtttcttcatgacgcttagcagaatcggtatgctctcggataacgttgttgttttatctgttccaagtgcactgatcatcacgtcggcaccttcgcttgctttcatcacgtcatcttcatttaacacatcaccttcaactattgttaccccatctttaattgaaagcttttctggtgatcgtacaagaacagatacgttatggtgatctctaagagcttgtgttaatattttgctaccaacccggccagtagcccctaaaatgaatacattcatcttatatcctcctcactagcgttttcactttattttagaaaacgttgtgatccattgcaaataagagggttccattttttcttattttgaatgaactgctctgagtaggttgatcgatttcataatatttcacaatagatttgcaagttttacttataaagttcagaatttttgttaaaatactcataacgtatgatgcgtgtttgctttagatagaggagaggggaagatcttacaatgagaacagcactttttgagagattagaagagttatatccacaaatggttgaactaagaagagaacttcatcagcatccggagctttctttccatgaagttcacacacctaaacgaatcgctgaattttatgaaaagcttggaatgtctattcgtactgaagtaggtggaagaggtgttgtagctgttcttgaaggagcatttcctggtaaaacagtagccttacgagcggatttcgatgctcttccaataaatgatgagaaaaatgttccttataaatcgacggtgcctggcgtgatgcatgcttgcggacacgacgggcatacttctactcttttacatcttgcaaaagcattaaacgaacaatgtgatcagttacctggacgagttgtttttatccatcaatttgcagaagaaatcacgcctggtggcgcaaagccgatgatcgaagatgggtgtcttgatggtgttgacgtgctttttggaacgcatctctggtcagggtttcctacaggaaccatcgcatacaaaacaggacgtattatggcagctgccgactcgtttgaaattgtcgtaaaaggaagaggtgggcatggaggtattccgcacgaagcggtcgattcgattgtcattgctagtcagcttgttagtcaattacagcaaatcgttagtcgatttattgatccaggtcatacagccgtcttgtcaattggctccttccatgcaggatcggcgtttaacgttatttcagaaacggctactctgaaaggaaccgttcgtacttttgatcgggatgttcgcgagaaaatcattacgttaatggaacgaatgattaaagggacgtgtgaaagtagcggggctgactataggtttacctatgatcgaggatacccccctgtcgtgaatcacgagaaggaaacgatgatgctgaaggaagcggcccaaagagtagaaaatgtaaaaaaagtggtcgaaacagaagctttaatggtcggagaagatgttgcttattatcttgaaaaagtaccgggaacgttctttttaactggttcaggaaataaggagtgcgcatcgacttatcctcatcatcatcctatgtttgatattgatgagcaggcgatgttaatagctgctaaaacgcttggagaggcaacgttatcttatttagaacaacatcgttatgaagcagaagaggttaagagttaagagaataggaggaggaaatgaatggcgagagggttgcttgaaaatgaagcagaattaagtaaaagacagctacatttattgatgcaagtatcaaccatttttaactcatcacttgatttctatgcggtgattcagtcagttattgaagaggccgtctctgtcattgatgctgcagacggtggggtgctctttttatatgatgatgagcgaaggagattgaaagtagcaggatcgactgggttccgaaagaaaacggtaaatgaggtattgcttcaatctggagaatcgatgactggccttgcttttgaaaaaaaagaaacgctccactttaaaacaagctatgaagtagaagaagcgatgaaaacaatgacgcctcagaatgcaacgctctaccatcagtccgctgatgatttacctatgagtaccatttgtattccaattactaaagaagacgattgtacaggggttatcgtgttagatcaatttaatcaagaaaaagagtttacgaaggacgatattcgattagttgaagccatctcgtctcaagcggcgattgctctcatgaacgcgaatttgtatcgaaacaaggaagcttctcttcaaaaattaaagcaatttaacaggacaatgattaatcaaaatgaaagtttatcaaagtccgtggaaacccaccatgccctatctgatatcggaatgaatgaaggttcttttcaagaaatttgttcttatcttaaaaattccatcggtaaaaccgtcatgatttttgatccatttggtgaagtgaaagcgtcgagccactctgaatggtcatcaactgtaaacttgcaagaaatgattctgaatcacctcaatacaattaagcaaaaaaaacatgaggttgaagtttttcacgctaaagaagatttcttgttattcccacttggtagactttccttcccactaggctatctggcaattatttctgaatcgctaccgcttacaaggtttgaacattctgctgtttttcatgcatgcacagtagctggtctacaattaatgaagcaagaagcggagcataaagagcggcagcggctcaccggtgaacttctcatcaatcttctatcttctcaggaagaggaagcggatctaagctatcttgccgatcgacttcaagccgattggaatgctttttttaccgttgcggttctcgatgttccgcaagaagtagagcagggacacgaagagtggttgcgaagttgcattcatgcatctattagtcatttgcttcaaaaaggtgatacgaaattgcttgtgacagagtgggggaggcagattgtcatcctcttcctcgatgctaatggggtagaatcttcaatcgtatcagtgaatcgctttatccgtgattttaaagctctcacttcatctattacgtcagaaaaaatgtgtagaatcggaatcggaaaatcagttaagggaatatgcgcattagaccagtctttcaatgaagccaagaaaacaattaaatttttagaacgctttacatttgctgggtattcgtcatggtatggagaaattggagcgcttcgattgttgttaaacaacaacgaggatgagcttgctaattatgcacttgagtatctctctcccttacttgcttatgagaagcgacgcaaaggagagctttttcaaacattgtttgtgtacttatcaacagggcaggatatcaaaaacgcttcagaacaactgcatgttcatgtgaatacaatgaactaccgtattcaacgtatccaagaaattttaacgattaattttaacgatccatctgacctattgaacattcaagttgcttgtagtatttatcgctatttatttgaagcgtaaattattcatcatctggctgaagataaggacgaagttttcgaacatatcgtcgaatatcaaataaaagtttcgcttgtaactttttgttttcttcaaatgtttgaatgtgggagatggaagggaaggatccatgctcattgaattgaactggaattagccctgtttttaataattcaccattttcacgattaatgatttcgacttcgacggatgcttcgaatgtatccggaatatgatgatcgacgagttgtttcacattttgtactttgaataatagttgagccattgtaaatcctccttcatctaccattacccattcttacaaagaaatagcctttaaaacatgtaaaaacagcctgttcatagaggctgtttttattagtttagaagattgttaaagaaagtaatcgctatttttgtaaatgtggaaggattttgaagaattttgtcaaattgatacatagaaaaacagaaagtcgatatcaaaatggagtggagtacgcgatggaaggactcacttacgagtttcattttttccttgttgttatttcgatattaatggttgtaagctacgcttatgtagcatttgattttcatgagaaagcttacatcatgacgcttccttatcgaaaactttgggtgtttggaagttcacttgcgatgggagcgggaatatggatactgcaataccttgttttattaggtctatcaacagcagatgcttctttttacgcgccctggtttgtaggcctatccctagctgttccagtcattggatctctcttagcgtttatgacgctttcatctagagggcagtttaagcaaatcgttaaagcaagtatatggattgcgctatcactattactattacaaatagttagttctcattatttattagggttaacttattcgataaatgactggtggagagtcgttctccctttgttgatggtttttttctcaacagttagtagtttatggcttgtttatggaatttctaatgaaagaagtaactcttttggaaaagtgtcaggagcgcttgtttttggtcttggaacgcttgcggtccattattttacaatgatcacatcttctgcagcaactaaatttgaagtagagagctatagtgaaaaccatctcttacaatacatggctttaacaggcatctttattatttctgttttaatgttaattcgtatgatgcggaatcgagagcttgaaagtcaggaatcgatgctgcgagaaagtgaaagaaaataccattctcttgtagaaaattgtccagatggcattatggtgttagatattcaagggcatattctaaatataaaccctgctttagaacgtatgagtgggtatactctagaaaatgtcagtcataaatcaagcttgcattttgtggaggagcgatacatcgagcaaacaacgaattgttttgagagaacaaaagaaggtgttccgcaaaaatgtgaatcagcgattagccatcgcaatggtcattccattcaagtgaaactaatttctattccacatatgatcgaaaacaagatgcagggtattattgttatcgtagaggatattacggagtttaaagaaacggaggagcttttaagacgctctgaaaaactaacggctgtcggtgagcttgcggcaggggtggcgcatgagatccggaatcctctgacgtcgctaaaaggatttgcgagccttgtttatagctcttctcatgatgagaaatcaaaagagtttttgcaaattatgctttctgaaatcgatcggattaattttattgttagtgaattcatgcttctagcaaggccacatgaaaaagaattcgccagaagtgatctggtttctctgctcagacatgtgatttctttgttaaaatcccaggcgattttaaagaacattgagatccgaacacagtatgattgcgaagagtttccaattttaggtgaagaaaatcagctgaagcaagtatttgtgaatgtgttgaaaaacgccattgaagcgatggaagatggagggattatttacgttaaagtaactgaaagcgagacaggtgtgaccgttaatattaaagatcaaggagttggaattcctgagcatcaattatcaagaataggggaacccttctatacattaaaggaaaatgggacgggccttggcctgatggtaagcttcggcattattgataatcataatgggaaaatgaggttatcaagtgtggaggggaaggggacaactgttgaagtttccttaccattatatgaaagaaagttagtaaaagcataagaaaaagcgctgaagcagcgctttttcttatgcttttatgtttatatgccagagtccgcctttttcaacgcctcaatcgtatctttttcaagaaattcagaggccggaatgtctagcgcagtcgagatttttaacaatgtttgtacgtcagggtgataacggttttcttcaattttttgcataagaccggctccaatacgaacttttaccgccaattcttgaatggtcatatttgcttctaaacgatgcttacgtattttgtctgctatgttcatcttgatgcccctccttacctgaaactttcacacctcgtacaaccatcacatcgcaagtggcgttacgtgtaatatgttctgaaacactacccataagcaatctctcaacacgattcataccagttgcaccacaaacgattaaatcaattttgttttgtggagcaatggtttttgcgatttttactttcggtgatccatactcgattacggttttcacattcgttactccagcgatcattgctttttcttcatattctttcagtagccgcttcccgaaatcttcagctctctctgttgcgatatcatataactcaaatgtggaaaaatttcttgtgtcgataacgtgcgcaatgattagggatgcttgatcttgaatagaaagttcgaccgctcttgagaaagcgacctcagcagattcagaaccatcaacagcaacaagtatgtttgtgtgttttacactcatttgcaatccctccattaataattcttgtacttcatatgtttattgtagatgttctttttgtaaaaaactgtgatctttctcacaccttttcagaaaaacttctactttttcacaccttttcagaaaaacttctactttttcactcttttgaataaactaatgttgacaaatatgcattcgcgcgatagttttgtattaaggaaacaattgtgcggatgggcacgaaagaggtatgaactgattgattatttttttatcttaaagttgcctttgggaaaaaaatgttcagaaggtgaagaatagagctgttaagcaaatgtttttcgcgaaagagacttggaaaagcacatcaagagaagaaagcccatacgttaggttaaagcattgtataccggattaaatgaatgaaggagaggttatttaaatgaaaaaatgggttgggtatcttttaggggcatcattgtttttacttatattgtcagggtgtagtacagaggcggataaacaaagtgaaggcaagattaaagttacaacaacgatcggtcaaattggggatattgccaaaaatgtggggaaagagcatgttgcggttgattctcttatgggaccgggtattgatcctcatttatacaaagcttctcagggagatattaataaactatcgcaagcagacatcatcttttacaatggcctacatcttgaagggaaaatgggagatatctttgcaaagatgaaggaagacaaaccgacctaccctgttgcagaggcaattcctgaagataagctattagttgatcaagcgaatgctgcagctattgacccacacgtatggttcgatatcgaattatggcaatatgctgtaatggaagttcgggatgcattaattgagtatgatcctgatcataaagcagactatgagaaaaatgcagaaacctatttaaatgagttaaagaaactagaagaagaagctcaggcaaagattaatgaaataccagaagagagtcgtgtgcttgttacggcccatgatgctttccaatacttcggtcaggcgtatgggatggaagtgaaggggctgcagggcttgagtacagattcggagtatggtctaagagacgttcagaatctcgttaatactctcgctgatcgcaatattaaagctgtctttatagaaagcagtatttcagaaagatcaatcaatgctgttgtcgaaggttcaagagaaaaagggcatgaagtaaagatcggcggcgaactctactcagatgcaatgggtgaaaaaggttcacctgagggaacgtatacaggaatgtatcgccataacattgagacgatcgcaaaggctttgaaatagatgttgaagggagctttaaaatgaatccaatacaagtatcaaatttaactgtggcatatgatcgtaaaccggttcttcaagaagtgacatttcaaatgccagaaggaaagttaattggtgtcgttggaccaaatggtgcagggaaatccacgttaatcaaagccattttaggtttaattcctaaagcttctggttctgttgaaatatatggaaagtcctatcgtacccaacgaaaattagttgggtacgtcccccagcgaggttcagtggactgggattttcctaccaatgctcttgatgttgttctaatgggaagatacggacatattggatggtttcgccgacctggaaaaaaggatacgtctattgcgatgcaggccctcgataaagtaggaatgaaagaatatgccgatcgtcaaattagtcaactttcaggtggccaacagcaaagagtctttcttgctagggctcttgctcaggatgcaacagtctatttcatggatgaaccgtttgtaggtgtggatgcagcaacagagaaagcgatcatttctttattaaatgaactcaaagcacaggggaaaacggtgcttgttgtccaccatgatttacagaccgttaaagaatattttgattggacgctgttattaaataaacaaaaaattgcgctcggacctacagaagaagtatttacagtggaaaatttacaaaaaacatatggaggccgtctagcctttctcgattctcaggttagtccttcctatgtggtgcagccataagggggaccaagtatgtttaatgacttaattttaacgttacaagatgcaaacacacagtgggtcctttttggaacaattcttcttggggttgcaagtggcgttctaggtagtttcgctcttttgcgaaagcaaagcttgattggagatgcaatggcgcatgcagcccttccaggtatttgccttgccttcttactttatggaacgaaatcaataggatggtttttagttggtgctgcattatctggtttgcttgccacatacttcattcaggtcattattaaccattcgcgtattaaggaagatacagcaattgggcttgtcttatctgtgtttttcggatttggtattgttctacttaccaagattgcgcaatccgaaaatggaaatcaaagcgggctagatgactttattttcggtcaggcagcatctcttgtagggaatgatgttcgcgttatatccggcgtagcgatcgtccttcttattgtgacatggttattgtttaaggaattgaagttgtttacatttgatcgtcaatttgcacaaggaattgggttgccgacaggcctacttaatggactattgatggctctgattgtaagtgctgtagttattgggcttcaggcagttggtgtaatcttgatggccgcgatgctcattacacctgctatttccgcaagatattggactgatcgacttgatcgcatggtaatcgtagctgggacgattggagctttatcaggtatgcttggaacattattaagttcgatggcaaaccgacttccaacagggccagtcattgttcttgcagcaacggttatctttttaatttcactgatctttgctcctaaccgtgggttagtttcaaaaggattaaagctctatcgaattcgaaaaattgttgcaagagaaaccgtacttcaaacgatgtatgatctttccgaagaagcaagtatagcgaataaaaaacctcttttctctaaggaagagcttctctctagaagaaaaatgacggttcgtaagcttgattcgaatctaaaacgacttaaaaaagaaggctatgttcaccgtataaaagacatgtggtacttaacagagtcgggcggatatgaagcctatgagattgtattaaataatcgcctttttgaaatatataccatgtatgagatgaaattcgcttctcttcaatttgctacgaatgatgtttggaactataaaaatattggttcatccactcttcacgagcttgaacagctaatggccattcatgagcggacaccaaagcttgagcccgaatattttggaaagggagaaacgttacgaaaggaaaagtcatctcaaagtgcggaaaaacgtaagaaagaggtgaagtcattatgagttatggagcatggattatgcttacaggatctcttgtgggtgtatcatgtggcatcattggctgttttcttattttaagaaaaatggcgatgcttgccgatgccattagccataccgttttgcttggcatcgtacttgcttatcttgttagtcattcattagaaggcatttatatgctagttggtgctgggattattggattgttaaccgcttttcttgtgcaggtgctgcattctagtggcgtacaatctgatgcggcaatcggggtggtcttcacttctttgtttgcctttggagttatcctgttatctgcttttgcaggtaaagtccacctagatgtgaaccatgccttgatgggggagattacattcattccatggaacacattaacgatcggtggtatggatcttggtccatcagctgtttggatgcttggcactgttctaattattaatctgatcttaatcttccttttttataaagagattaaaatcagttcgtttgatccagcgatggccacggctattggaattcctgtcatgttcattcactatttattaatgtcgatggtatccattacaaccgttgcttcatttgatagcgttggtgcaattcttgtcgttgcgatgttaattgttccaggagctaccgcctatctattaacagataaacttctcgctatgcttttcatcagtgcagtaatcggggtcatttcagcgataggtggttattacgctgcgctcgtttggaatatttccatctcaggttcgatggcttctattgcagggcttatctttgccgcaacgtttattttatcacctcgatatggtttattatcaaagttacttgcaaggaaaaaccttctcactgaatgatcttaattgtttaacgcgatgaatcggaaaagaaatgattcgaaactatatgaaaatttcgtgatctgtagtatagtaaagaaatgcgatagcttgtgcccacaagtctatctcctcaattagcagccctgtaagcgaatgctggattcgcttacagggctattttttttatggtagggaaattttcctaataatggatcgggaaattttttaccttttaggttgaaagtaatgacaactgggaatagaaagagtggataaatgatctgagagaaatggaaggggaatgatgatggaaactggtacagcagcaaaacacaaagcaaaacaagcatcaaacgatgtaaagccctggattagagggcttgcaagagtggggtatgcagcaaaaggcgttgtgtatttaattataggaattctagcatttcaggcagcgtttggtcctggaggaaaaacaacggactctaaaggggctttcgtaacgattgcaggaaaaccttttggtgaagcccttttgtggattctaattgtagggttaataggttactcagtttggaaagggatccaggcgattaaagaccctgataattatggcaatgatacgaaaggtattttaatacgaacaggattttttggcgctggcgtcatccatttattccttgcgtataacgctgtttcgattattacgagagcaggaagttcatcttctggtagtaaacaatcaatgtctgctaaactattaggccaaccgtttggtcagtgggttattggatttatcggcttatgttttataggttttggtgtttatcaggtaatcagagggtataagaaatcattcatgaagcaactaaagcagtatgaaatgcataatcaagaagaatggtgggggaaaagagctggacaaattggtcttgtagctcgaggcgttgtattttcaatgatgggtattttctttattcaaacagcgatgacggctaaccctgataaaacgaagggacttgacggtgcactatctgaactagcaaagcaaccatatggtgctatattgcttggtttagtagccattgggtttattgcttacggcatttttatgttcgttaaagggaagaatagaagaatgaatttttcataatcacaacgatgtaagaaggtgatgaaactgaaacaagttacgcttgaagaagcaaaaaaaggaattgaacagaaccgcctgtactttttatacttatttggtacgaattgttcggtgtgtcatgcactgttgcctcaagttgaggatgtacttgaggattttccacaaattacgcgggaaaagcttaatgttcatgaaattcctgaagcggctggagctttttcggtttttacaatacctgttcttttgctttatgttgatggaaaagaaagcattagagaagcaaggtttgtcaatatcgaatcttttcgttcttcgcttaatcgaattgtttcattgttggactaaaaaacactcatatgagtgttttttttgtttgaaaaacatatacactcgaatggaaaattcagtatactgaacatatctcttttagaaaggaattatatgacagtagaatgaatcactccaaacaattaacttcaacctctgaaacatctctttttattattttattagtatttagtattttgacttatattttcttgtttttttcagttattggaatcgtgattatcgcgctattatggttaatttccttttttagtaatggcctctttcttggacaaatcagaagcaatggagtgaagataactgacagccagtaccctcaaatcaatcaaaagatccaaggtttatgtagggaaatggacattttaaaaattcctaatgtttatgtggttgaatcggcagggatcttaaatgcatttgcgacgcgtttattgggtcggaattttgttgtactctattcagatatttttgaactgatagaagaaggcgctgaggaagaagtgacgtttattcttgctcatgagctcgctcatattaaacggaatcacatgttaaaacaaatcctccttttaccaggtaatgtagttccttttctaggatcagcctattccagagcatgtgaatatacatgtgatcggatgggggcgtatttcattgaaaacggagagcgtgcaggaaacggattaatgattcttgcggtaggcaagcgcttgtaccaaagtgtgaacaaagatgcttacatcatgcaacttcaatctgagaaaagcttttttgtgtggttaagtgaattgttgtcgacccatccaccactacctaaacgaattgcagcagttgagactttcatgaatatgcgggaagaagcgcaatttcctgctcctcgaaagaaattagtcattctttcgatggtcgtttttcttttctttgttggtggagtaggatcagcggttcttgcatcggaagtaattatcccgtccctttcttcagcatttgaagaggaaagcgtgtttgatgatggcgaagttaccggcgttactctccttatggaagccattatgtcagaagatgaagcagaatttcagtcgctgatctcagccggaaatctggaggcaactgattctgacggttggaatgcgcttcattatgcagcagaatatccggaagatgaaaaaatgcttgaaacgctcctggatcttggaatgaatcctaatcaaggtgatctttatggtatgaccccactaatgatttcaagtcaaaatggctttgtttctaaagttgagcttctccttgtagctggagcagatccaaatcttgaagatcaggaaggatggacctcacttatttatatcgcttacatggaaccaacaaatcgtaacgatctttatgaaatgcttattgcagctggtggggaccctttcaaggaagatgaagcaggttatactgcaattgactatgcacgagatgcaggaaatgaagaagacgtaaagttgttatctcaataatggtagagtcataggatgttgacctttttttcaaagtaacaataatatgagaggcggaattaaaatgaatgattcgcaagttttaaagcaatttacgttttggcgctatcgtacgatccaagcgctggatgctgtcacagaagaacaagctgattgtcttccggaaggtttttcgaatacggttcgatggaatttagggcatattcttgtgacggctgaatttgctttagagcggtttacagaaatggaaaagagcctgccaggaaattacacagctttatttaaagcgggtacgcgacctaaggaatgggtggaattaccgccttcacttgcagagataaaatactacttaatagagcagattaaccgtattaaggagttggaaggtaaacttcgcgatccgcttcaacatgaattttcaataggctcttatttggaactcgagacaattggagaacttttattatttctaatgaatcacgagaaccttcatcttggaacaattagtggcattaaacgagcacaaggtataaaagaactttggaaaaaagcatctgtatgagtacagtcaaaaacgcgtgtgattcacgcgtttttttgtttggttacaaaaaaaagtgtaagaggcgagctaagacgcattgtatttgtaaaaaacacaggaattttaaattttctaaaaaaaggttgaacacttttagggagttgttatataatactaacaaataaaacaaattgtattataacagatggagggaagcaaaaatggattgttacacttgttatggaaatggtgaacttgaatgtccgcactgtcatgggaaagaaagaaaaaatgaaggttgtcaccactgtgagggagaaggatgcgtcgggtgtcaccgttgtaacagtagcggtagacttgaataggagggaaagctgtgcttgatggaattgttgaaagcgctaacgttcacggaagtgacttactaacacatgaggcgatggtgtttctagagaagcttcatcgtcgctttcatcaagatctacaacagttagaagaacatcaaaatcgcacatcgatgaatggtcaacttcttttggatacaaaggatataagagaagctagttgggaagtaaagcctgtccgtaaagaccttcaagagaggcgcgtcgttctcaaaaattctgcctctcaattagaatccgtacatccacaatctggagccaatctttttatagctgattattttactgaatcgctttctttcactgatcgtttgatcacacaggaaaatctgaagtcgtttattcaaaagaatttttttcacacggtcccgaaaccaatagccgttatgattacaccttctgactggagaaggaaagatacgatcaatggtttgcaaatgtcagctagtctagtagattttggtctttatgtttttcatcatactgaaactttaaaaagaaatgcttcagctccatacctttgcttaaaaggactagcgacttacgaggaagcgaagtggtggaataacgttctttcttatttagaaagtgaaatgaatttgaaagaaggcacaatgaaagcaacaatcacgatcacaatggaaaatgttcatcaaacagaagaaatgctttatgaactacgtaaccattgtgcggggattcacttgatagaaggaaacaggggaataacggacgtagcaagatatgttattggtattggacacaagcgaaaaacccacgtcattagtgagggtagtataaagaaaccacaggctgatcttttcgaaacagggacgcgagaagcggtagaagggtttgacggtaaatgcgtctcagatgccagtttgatccagatgatgaaaggcatttggaaccactatatgcctgaaccaaatcaaatatggaaaaagcgccatgaatacttaagtgtattggctgatttgaaccaaacgaaggttgtataacttaaaaaacttagggggatttaatcatgacaaagcaaacggcagcatcacttcaagaaaattggaagcaagatcgttttaaaggaatcgaacgtccatattcacctgaggaagtgttgaggttgcagggctccattcaaattgagtacacccttgcaaaaagagggtcagaaaggttatggaagctcgttaacgaagaggattttattaacgcgctaggtgctcttactggtaaccaggcagttcagcaggtgaaagctggcttaaaagccatatacttaagcggttggcaagtagccgcagatgcgaatgtatcggggcaaatgtatccggaccaaagtttgtatcctgtaaacagcgtaccacaagtcgtaaaacgaattaatcaagcgcttcaacgtgcggatcaaattgaacattcagagggtattcacgatcgtgattggtttgtaccaattgtggctgatgctgaagccggttttggtggcgcgttaaatgtttttgaacttatgaagtcgatgatagaagcaggtgcagctgctgtccactttgaggatcaactttcttcagagaagaaatgtggccaccttggtggaaaggttcttcttccaacacagcaggcggtgaaaaatttaatctccgcccgtttagcagcagatgtgatgggcgtaccaacgttaatcattgcacgcacggatgcgaatgcagccaacttaattacgagcgatgttgataaatatgatggtgagtttttaacaggtgaacgcactcctgaaggctttttctacacgaaaccaggtcttgatcaggcgattgcaagaggccttgcttatgcgccgtacgctgatcttatctggtgtgaaacttctgaacctaatttggaagaagctcagaagtttgcaaatgccatacatgagcgtttccctggaaaattgttagcttacaactgttcgccttcttttaactggaaaaagaagctggatgatgaaacgatcgctaaattccagcgcgaattagggaaaatgggctacaagttccagtttgtaacacttgctggtttccatgcgcttaatcacagcatgttcgagcttgcacgcgactataaggataatggaatggcggcttactctagacttcaacaagcagaatttgcaagcgaggcagacggctattctgctacaagacaccagcgtgaagttggaacaggttactttgatgccgtatcacaagtcattacaggtggtacttcttcaacaactgctttgaaaggctcaactgaagaagagcagttcacttcaacaaaataagagaaaaaaccggctgaatttcagccggtttttatgtggaattcgtttatatagagaaagcgggtgagaaagagtgctagaaaacggattggatgataattgaaatacacttatttccgcgatagttccaagaattccgcgaaaagtgctcataattccgcgatttttcaaatatatccgcgaaaataggattaattccgcgaagttggttttggatctcacggggcgcttccgcttttcatagatccagctgcgactcgcagaaactgcgatatttcgctctttcaccagaacacaaagggcgtgttctagttcaagagctccaatatctccgtttctaaacgctcgtctccgcttttcatagatccagctgcagcgcccagcctctcgatcgcttcaccccataaaatgaacacaaagaccgtgttctttttacggggctccagcgcttgtagaggctaaacgggcgcttccgcttttcatagatccagctgcgactcgcagaaactgcgatatttcgctctttcaccagaacacaaagggcgtgttctagttcaagagctccaatatctccgtttctaaacgctcgtctccgcttttcttatttaaacttaattcctgattcttcaacaattccaccttcgttagcttcgactagggtgtcgagggctttgtttaggacttgtttgtgctggtctttgttgttaggttgccctacagcgctgccgaatgggaagcggttgtatagggagcgaggtatgttaacttgttcgctgatttctttagacattgttaatgtgattgttggaatgccgttttcttcaagtacgcgtgcgaccagaccggccgactgttgacagactggtcaggaaggcaccaacaaggcaaaatctacgttatctttaagtaatttctgcgccacctcttgagctgtcacattttttagtgggtgaggtgtggggatgtatcccataaagctatagtgcgtttcggcaagttccccgatacgtccttcttcttgaagttctttcataacatcaagagggaagaggacgtttgcatcttgcctagcatttgtttgatcatagtgctcatgagaaatagaaagatcttttaaagaagttgaaacaggaatctcccgataagatgggtcaccaagtccaaagttatcattaaaaggtgtttggccttttacataaaagccaccagttgagattacagcaccttttgcatgacttaaatcttttgtaaacggtgtaaaggggcttgtttcattcttttcataacgaaatgagggtacccaattttgttgaacggcttgttcgactttttcaatcatattttctcctccttataaaaattatagtacctgttggttttagcatgtatgcaaaaaaaacaaaagtaaaatggcctgaacagcataaacgacttccttttgaaataggatggatagtaaacgagcaaggagggacaggccgctatgataaagagaagaaacgccttaatcaaatgatcattcgcttcttcactttcttaatcggatttggtctctccgttgctggcggtgttacgttaattcttcaactaaatttaattataattggacatagcttgtttgaatattttgcttatatttcaaaaacaacggaactttatttatttgtatcaggtgttatcattgtttggattagtgtttattggccgaggttgtagctcttaagaattcgaatatctccgctaatgcccccttcccgaataagaaacctctcataccctatactgtaggcaaccatcatgatagccaacaggaaagggaggagacctatggacaattatctcccctcacaggggaatttttatcattatccagaaacaagagtgactcatgaaatgagacaatatgcccatcagcggccatatccctttattggtggttttgcaggagggctcgctggaggacttgcagggggcttattaggtgcttttctaattccaggattatacggcggatatggctatcctccgccgcgaccaggatatggttacccaggtcctggctatggcggttatccggggtatggatacccaggaaatcctggagggcgaccaccttatggatatggaccatatcgatcataatcgtgtaaaaagcaaagggcttcctttgctttttactttgtcattttaaaagggattccatgttaattgacgagctttcgcaaatcgcttgtttacttcattccaattgacgatattccaccagttctcaatgtattgctttcgtttattttcgtactgtaaataataagcgtgctcccatacatcaatggcaagaaggggagcaatatcccattggctcaagttttgatgtttttctgcttgaaggatttctagtcttcttgatacaggagaccaaactaagattgcccagccggaaccttctactttattcgcagcattcgtaaactgttgcttgaatttattgaaagatccaaaactcttttgaagttcagatagaagttcactatccggttttccacctttaggactcatgatgctccaaaataatgtgtgaagatagtgccccgccccgttaaaagctaattcacgttcccaatgtttaatgaggtcaaattcattgttttttctagcttcctgtaaggcaagttccgctttgtttaatccatcaacatagctttggtggtgaatatcatggtgtagctccataatccttgcactaatggctggttcaagtgcatcgtacttgtatggcaaaggaggaagggtatgtttgccgatcggaacggaggtcgtattttcttgcaagttacgccactggtcatataagtggtgagctatttcataccatgccttttcttgattatcatgaagccgctcttctgaactttgcatttcgtctaaccacttttctgtacgacgaagtaagggggatttcaattgttcatgagctttactagctaagacttgatctcttagtagatatccccattcaagcagtttatctgacaatcttctcatcccttcaattcttatttagacgttattactatatgtgtcgtgttactaaattgtttcaatctcttaataaatgtttttaatatgaaacatttgggtaacccctctttatggagttttacgttaagggggattattatggggaaaaaaatgaatgaagaaccacatacaggaataaacgagggccgaaggaaaaagaagcgttttgctcggaacgtactattaacagcagcttttttaatggtgtttgtcttaacttttggcggttaccaaacgtatgcctacattaacgaagcaccaaagcttgaaggaaataaactaagcttaccgcaatcttctactttatttgatgctgaaggaaacaaaataactgacatagtcggaaaagaacatcgaaaggttgtttcatttgatgaaattcctgaacatgtagtgaatgcttttattgcagttgaagatgtaaggtattgggaacacaatggcgttgatattaaacgaattggtggagccgttgtcgcaaatattcaagatggttttggggcagaaggggcaagtacgataacgcaacaggtcgttaaaaatatgctccttgaacctgaaaagaccattaaacggaaagttcaggaagcttaccttgcaatggaattagaaaaacagtattccaaagaagaaattttagaaatgtatttaaataaaatttattttggacagggagcctatggcgttgcaacagcagctgagacttattttgataaatcacttgacgagttaacgacagctgaagctgcattattagcaggacttccacagcgtccgtctggatatgatccatataagcatcccgacattgctaccgatcgtcgagcaacggtactgagcttaatggagcaacacgggtttatctctgtacaagaacgtgaagaggcggcttctgtcgctattgaagatacaattgtggagaagaaaaatcagtctacaacaaatgatgcttttattgatcaagtgatcgatgatctagaaaaagcaggtatccctgaagaggctctttattcaggaggattagaaattcatacaacgctagacactcaagcacagaaaattgtcgacgaggcgcttacaacaaatcaagtagtcgaataccctgatgaggaatttagagctggtctctctcttattgatactcagtctggtgctattcgtgccattggtggtaatcgtcaaaccggagaagatgacgtccaaaaaggatttaattatgcaactcaattagaacgttcaccaggttctacgatcaagccaattcttgattatgcaccaggtatagaaaaactaaaatggtcgacaaatcgacagtttatcgatgaagaacttgaattgaatggaaaagaatttagtaattggaatgacgagtttcaaggcagcgtttcgattcgagaagcgcttcaatggtcttataatattcctgctattaaagcgtttatggaagttggaggagaagaagctcaaagctttgcagagaagctaggcattacaattgaagaaacatatccggcctatgcgatcggtggctttgcgaaaggaatctcacctttacagctttcaggagcgtatgcagcgtttggttctggcggaacttttcacgaaccttatagtgtaaagaaagtggtctatccaaacggaaaagaaatgcagctttcctcaaaacctgaaaaggcaatgagtgaaggaacagcctatatgattacagatatgctacgaaccgtcgttaaaaaagggacgggcatgcaggcagctgtaaaagggttagatatagctggaaagacgggaacaactagtcttgaagaaggcattaatggagatggtgtatcagacgcatggttttctggatatacaacgaactacaccgcagcagtttggaccggatacgataaaactactcaaagtacttacattcataaagaagatgatgacattgcaaaattgctattccagcatgtaatgagtgaagtatcaaaagggaaagatacacccggttttgaacagcctgattcagttgaagagattgaaattgataaaacatcaggactacgtgcaaataatgcaacaccttcatcaaatattattaaagaactttattttaaaggggaagagccgaaaaaagctccattacctaaaaagaaagaaccatcaactgataacgaaaatgatcaaacagatacgaaacgccagtccgaagaacctgcagacaactctgcaaaagaaaaaaaacaacctgagaaaaaagtagaagaaaagccgaagccaaaaccaaatgattctgtaaaggaaaaagaaaaggaagaacctaagaaacagaataagccagaagaaaaacaagagaagcagactaaaccagaagaaaaacaagaggaaaagactaaaccagaagagccatctgagccagaagagccatcaactgagccagaggaaagttcagagtccgatagctctggaaattctgagggtgagagtactggtgaaagtgagacgacaccaggtacgaataatggagactcaggaaatgaagactcaggtaatgaagaaacaagtgaagatgaaactggcaccgaagaaaatggtgacagttcaggaaatactgatcagtctgatgatacaggagaaggtagtcaaggtactactggcaatgactcctcttcaggtacaagtgatgacagcggaagtagtgaggaaggtcaggagtcggaacctgtggaaagtgaagaagcaagtgaaccaacaggaagtccagaaaatcagtcttctgaagaagagacgacctcttctcggaagaaggatgattctactgtagaagaaaaaaatgaagaaaaaaatgaagaaaaaaatgaagaaaaaaatgaagaaaaaaatgaagaaaaaaatgaagaaaaaaatgaagaaaaaaatgaagaaaaaaatgaagaaaaaaatgaagaaaaaaatgaagaaaaaccaactgaataacctcaatttgtgacgaatgtaacagtcgtagcaagcagcctccattatgatgaagaaggaaaagaaaatttattcatcaaatggaggtttttattatgaaagcagccgtagtacatgcgtttaaagagcccctatctgtcaagaatgtggacaagcctgttattgggcatggagaaatattagtacgtattaaagcgtgtggggtgtgtcatacggatttacatgctgcacatggagactggcctgtaaaaccaaaactaccgctaattcctggtcatgaaggtgctgggattattgaggaagtaggggaaggcgtgtcatacttgaaagtaggagaccgcgttggggtaccgtggctctactctgcgtgtggccactgcgagtattgcttgacaggacgtgaaacgttatgtaaagagcagcaaaatgctggttattctgtagatggtggctatgctcagtactgcaaagcagatgctgattatgcagtcaaaattccagataacttaagttttgaagaagtagccccaatcttttgtgcaggagttacgacttacaaagctttaaaggttactgaggcaaagcctggtcagtgggtaggtatatacggaattggtgggctaggacacgttgctgttcaatacgcgaaagcgatggggcttcatgtcgttgccgttgatacgcataatgaaaagcttgctttagcaaaagaactcggcgcagatcttacagtgaatccgctcgaagaaaactcagcagaatttattcaacgagaagttggaggggcgcatggtacggtttgtacagctgtgtctaagcctgcttttagcgaagcctacgctgctgttcgtcgtggtggaagtgtcgttgcagttgggttaccaccagaggagatgccgattcctatttttgatacggtactaaatggagtgaaagtaattggttctattgttgggacgcgtaaggatttgatggaagctctccaatttgctgctgaaggaaaagtgaaaacgatcattgagactcgtccactagaagagattaatcaaatttttgaagaactcgaaaatggagacattaatggaagagttgttcttacgttcgaataaaaaaaccgccactggcggtttttttatgatggagatggaggagctagtggtacatatggtgttgtttctgaaacttgtgcacttgggaggtcaggagcgggttcggtatatccccctgtgttatataggttcgaaagtggtttaattataccagcactaccaatttggaggacggaagaattcgagattccctcgacccttagctggtgaatgacgatgttttggttcacaaagaaattcacgaatcctcagctccctaattgttagcagtgatgttttcatcggcaacgtctggatcaagcgaatttgttaagctgaatccattgtttacaatatgaaaatcccctgtattgaatcctcctgaaccagcatatgttttagaagttgatttcggtgttgtgttaaaactatcgccaaagttgacgactccacctgcactattaattttaactggtcctacaattgaaggcatggttgaacaccctttaatttgttatacagtagtgtatgtgcttgtaagccgatacgttcttaatcttcgtctgcataaggatcagagaaatattcgcggttatgttttactcgagcttctgtgcgaatcgttcttgtagatcccacatgaagaacagatgaagcagcgatacctatgatacgtatactactaactttaataattggattctcatggatcgtcgtttgccttagctcttcagtaagaagagggaggggcaggggttgtgagtaaatcgggaattgggtcaggtcttcaacttcatcgccattaaaaataggttgctctctttgtaaggcataaatttttgtttcaggtgtaatttgattactatcaccaatttgcacaatgctactactatcgagcgaggtgacataaatccagtttacaagtgaggatcggctatacataaaatcatatccttatgacgttgatagcggtacaaatggtcttgagatgattaaagattccggaggcgtatcaaaaatagaagagcaaacaatcgattcggtgtcacctatgagaaatacagacgaacttgcgaccgccgtaatatctatgtgaccgactgataatcccctgttaattacggtgtaattcactttaaatcagtccttcctggtaagtttttaaggaaagcttccattccatttgagatgtctcgcttaattttagttgatacatcctctacaagttgctcaacatttccttcgggtgaacgcgtcgtttgttgattaacataataattaattctctgatcaagctgcttttgaatgtcatttaagataaagtggcgatacgggtcatcaagtggatattgatattttttctctaactcacctaacttttgtaacgctccattttgcatatacgattgcacattttgttgaatggattggattgcttcaggcggaacattggatggattcatcccattcccaccattcactgtaaagtcatccagcacgtcggcccctccgttaggcgtaagaccaatatttaacgttccatcaagtctttcaatctttaattgatcaaatttatattcgattttttcaatattcgttttaggggttttagataattcattgcaattatcccttaattcatcaatcatatcctcaagcattttgattcgattgttttgatgttcaatgctttgttgcatccgctgcaagatcgcgtagaaattatcgtttggatacattgactatcaactcccgtatcaaaatgttggtcctaacttatgctattgtatgttgtgaaaaaaattaggtgaatgccctcttatatattcgcaacaacattttgatccgcaacatcactatcgtttacacttgtcacgctataagaactgctcacgtttaagccatccccagtattaaaagaccccccacctgcaaaggttcttacggcactggttggagatacaataaagacatcgccgacgtggaaaacaccactagttccgatcgtgtttactttaatagctccgacgattgccggcatggtttcacatccttataaacagatttcacttattactgtatgcgggataatagcgtatgttcgaaaagaagagatatggtaaactacctgagtaaggtaggtgtgaagaatgaatgacgtaagtaaactaaatatagagctcgtccgtgtgattaaagaatgggatccgctgtccattgggatagatgattatgatacggaagcagcggatgtggtccagcttgttcatcagctagatgatgtagcagagttaggcaaagaaattcaaggcatttatcatttttcgtatgaagaagtgattccactttcgaagtgtgaacagttagccattcagcttctcgcactaaaaaacaattcatcatgtgagcgatgaacacgaagcagatcctaaatggatctgtttttctttatgaataataattttctttcggtaaaaaataggcaagtcaccaaacaaaggagaagggatgtaatttttatgaaatggatatggagtttcattatggtggttgcgcttttagtagccgtctccccacaaagtctagcagcggaaaagaataacaatgcgaacgttcgagtcatccatgcttcaccagatgcgccagcggttgatatttatgtagatggtcaacccgcctttaaaaatgcggctttcaaagatgtgactgactatgcgatgttggcacctggcgagaagacgattcaagtatttgcttcttctgctaatggagaaggaaagccagttcttgaacaaaaattatctgtagaagcggggaaaaattattccgtacttgcggtcggtaagctcgagaatcttgcactaaaagtacttgaagaccaaaagggatcaggagaaaaagctggtttaagagcggtacatgcatcaccaaatgcgccggcagttgacatcggggtaaaggatggagatgcacttattaaaaaccttgcttttacccaaaactcggaataccagtttgttgatccaggaacgtacaatttagaaattcgaccggctggaacggacaaagcagtattggatctacctaatttaccagtagaagctggagtaaactacacggcgattgcattagggttattagatggagatccttcattaaatgttattcttctaaaagatgggaaataatgataaagccgcagcttagctgcggttttatttatctataaaattaacaaaggagcagtgggaaagatgcatacaaaacatactgtaaggtacatttgtgaacgttatttgagcgggaattgttactattataaacaagagcttattacacatgattcctggcaaaatccagcttcaatcaactggtcaacgaaaagaccaatatctagtagaacgttctttgctaaggaaagggaagggtataaaacggtcaacattttgcatcgtaacaaaccagctgaagttcttccattcttaagaacataggcaggtttatctgattaaaaaggaaggtatgtgatagagaaaggaggaattaatgatgaaaacaacttatcatgttcaaagtggaaaaaccaaatcatgggagataaaaaaagaaggagcaaagcaagcgactaaaacgtttgaaacaaaagaagaagcttaccagtttgggagacaaatttgtgatgaaaaccgaccttcagagctagtcgttcatcaagaaaacggtcaaattgaggatagaagtctttataatagctagacaattcttttcgattcgtacatatttttcagcttatgaataaacatagtactaactactatcctgatgaaagaagggaatattcatggattttataagtccaacagctggaaaagtaacgatcgaacaggtaacacacttgattgagaattacacgaaagaagatcctaaggccatctatcggatcgtcattggaaccgattcacagacaagccgtaaagctacgcagtttgtgacagcgcttattattcaccgtgtcggcaaaggggcgaggatattctacaggaaagtgaaacaaaaaccgattcatgagcttagacatcgcatttacaaagagactgaaatgagtcttgagctcatggaattgttaaaaaataaagggtttgcggaactgttagaaacgtggccaattgaaattcatcttgatgttggaaaacaaggtgaaacgcggaaggtgattcaagaagtcgtgggttgggttacttcagtaggatatatcgcacgtattaagcccgattcatatggagcaagtagcgttgcagatcgatacacgaagtctattagttaaactggcccgatgtgccggtttttttgttgtgaaaaattggatggattgcacgattattgaaacctcgtcatcgttcactcgtattactagtagagtaaaaaaataggaggagagctaaatgaagtttcgaatgattgcaatggttagtgcactcatgcttatcttagctgcatgcagtgggacttcggaatctggtggggaagtaagcgttgaagagggtgtcgacgcgaaagaagtttttgagaaatccattttagctcaggaagacattgataatttccatatgaaagcggatatgagtcagagcatcggatcaggtgaagaagagatggaagtgaagagcgtcattaatgctgatatggtgatggatccaatggcttttcatcaaaggattgatatgtcagcggatggagaaagcatgcaggtagaatcatactttactgaagaaggcttttttatgaagcaaggtgaacagtggatgaaatttcctgatgatatgacggacacgctgctttctcttcaagaagcgcaaggtgatccccttgagcaaatggaaatgctaaaagaatatgttgatgaatttacgttaagagaagaagaagaaacgtatgtgatgacacttaaagcatcaggtgagaaattccaaggtttaatggagaaaacagcggaagaaatgggtggacaaaatcaaatgatggaagacgcaatggatcaaatgaacgtaaatgaagttgcctacacctatacaattgataaggaaaattaccttcctgttcaaatgaaaatgaagatggatagtgagatgaccatggaaggtgaaacgatttcaagtgtgatggaaatggactccacttatgatcagtataatgaaattgatgaagtaaaagtcccggaagaagtgattgaacaggcacaggaaatgccgggaatgagtgagtaatcatgtgagtgctgtgtaaagcagcactttttttaatgttaaaaaacaaagaaatgcgatattactggaaaaaagtgcacgaaagcgttacgattagctcattagtattgtttgaaaggagcgaagataatgccttcagaaaaccttgtttacgatcaatttaaacgcccactaagggatcttcgcatatcggttacagaccggtgtaatttccgttgccgctattgtatgcctgaagaaacgttcggtccagattatgaatttcttccaaaaacaagtctccttcaatttgaagagattacaaagcttgctcgtttatttgttgaaatgggggttgagaaaatccgtcttactggtggtgaaccgcttttaagaagagatctggatgtcctaatcaccatgttatctgaaattaatgggttaacggatatagcgcttacgacaaatgcttcgcttctgaaaaagaaagccttcaagttaaaagaggcaggactaactcgagtgaatgttagccttgatgcgattcatgacgaaacatttggaaagatgaatggaagaggcacgaagataaaacctgtccttgaaggaattcaagcagccgcggatgccggtcttcaagtcaaaatcaatatggtcgttcaaaagggagtcaatgaccatgaaattgtgcctatggcttctttttttagaaatagtggccatatcgttcgtttcattgagtacatggatgttggaaattcgaacggatggaaatttgatcatgtgatgagtaaaaaggaaatcattgatcaattatcagaagtttatgatttagaacctattgatgcagcatacttcggagaggtcgcgtcccgttaccaatacaaagatggtagtggagagattggcgtcatttcatctgttagcgactcgttttgttcaagttgcacaagagcgcgtctttctgccgatggtgctctgtacacatgcttatttgcttcaaaagggactagtcttcgaaacccactaagaaacggagcgaccgatgaagagctaaggaccatgttagcaaacttatggcatggacgagatgatcgctattcagatgagcgaacggaagaaagtgtattaaatcgagaaaagatagaaatgtcctttataggtggttaacaatggagaaacacttaacagatcgaatcgtattaagctatcgagaaggcgaatgggtggaaaaagacgaccaaatcgcattagaaaagccgttaaccattcgagtgaatcatacggagtttgcaacgctcgtttgcacaccggatcatttagaagatatggttacaggttttttagcatcagagggagtcatccggtcttacggggatattgaggaaatgctctttaatgaaagtcagggaatcgtgaatgtcaaagccaatgttcacattcctttaacatctgaaacgtatacaaaacgagtgattggctcttgctgtgggaaaagtagacatttttacttgcaaagcgattctaggacggctaggactattatgaaggcgccacatctaacagcacaagaatgcctcgggaacatgatggcgctacaaagccaatcaacgacttttaaaacaaccggtggtgtacataatgcggctatctttctcgatggtgagcttttagcttcacgaaccgatattggaagacacaatgcgctcgataaattatatggatatgttcttcgtcatcatctcaagccgtccgatcttagcgtagcctttagtggcagaatatcgtctgaagtcgtcattaaactttctaaaatgggtattggtgttcttctctcgaagtctgcccctactgagttagcgattcaattggcagaggatttaaacataacaaccgttggttttatccgaaacggaggatttaatgtctacacaaagcccgaacgcattgaacgctaaacacctcaacttttgaggtgttttttttgatgaagtcgttcatactacagaacaaaaggcttttagagaaaggcggatcaagtatggcttggacaatagctgtcattttttgggttgctggtgttgcgttagtaggaagtccccggtatttgtttcatcgccttgaggctatgaagtctaatacggctggtcgtgcaagagcctctgaagcttccaacaaagatgaaagtatctttttctttattgaaacaaaagcccttgactcaataccgtggtgggtcgtgacaatcacttgtgtgacaatcggactctttttcattgcgtttggtgtcattgcccttgttttttcatactaaattgaaactttctcgttcttttattcgtcattaatagaggaaggagactgtgagcggtttggtttcctttctttagtggtaaagaaagagaaagctcgtttgagatagggagatatgaggggtgcataattgatggatgtagagagaagaaaagaaaaggaattgtggcgattttattttttattagtcgcgttactttccctaaaaacctatctggtttatcgatttgaatttactttttcgttaaacggtataggggaagagttattcctgatgataaattcgataggatcaatcgcattactgctaggtatcggtctatttagaaagcagtcaaaaccaggcctgatgctagcagtttattttattttgtcagcattactttattgcaacattttatattatcgtttttacatagactttgtgacagtacccgtcctctttcagtttggaaatgtaggaggtcttggtcagagtacagttgagttattgaacttatatgatccgttcattgtctttgattcaatcgttttattttggttattaaagcggaaaggactacataaattagctctttccaagaaactgaagaaaagaacagcgattagtagcgtcgcagttcttttatgtacagctgcgttagcacttatcatgcatcctctattatttgaaaaatcatatgatcgagaactgtttgttaaatcgctaggagcctatacgtatcacatttatgatattgggtttaattcttttacgtcaattaatagtgcatttgcagatgatacggagctatctgagattgagaagtatgtgaaagataaggaagtcgaaccttcctcctatgaaggaatagcaaaggggaagaatcttattcttatctcactagaatcgactcaagcgtttatgcttaatgaaagtgttaacggagaggaagcaacaccttttttaaataagttaaaagaagacagttttttctttcctaatttttatcatcaaacagcacaggggaaaacttccgatgcggaatttatgattgatagtagtttataccctctttcaggaggatcagtatttgtaagaaagccacaaaacgaatttttctctctgccagaggcattaaataacgaagggtatacaacaacatcttttcacggaaatgatcgtgagttttggaatcgatcagaaatgtatgagacgctaggatatgatcgtttttattcaaagaaagattttgacgttagtgatgagaattccattaactatgggttaaaagacattccattttttaaacagtcgattccctatttaaaagagttggagcagccgtattctgctaaatttttaacgctgacgaatcatttcccttatttattagaagaagaagatacaatgatttccctgcctgagacgaaagaagaagttgtgaaccgttattttgcgactatccgttatgaagatgaagcgataaaaaccttttttgaagaaatgaaagcagccggtttatatgaagattcgatttttgttctatatggtgatcactatggtttatctgaaacgtacgatactgccctgggggagtatctgggtgatgaaattggcccagttgaacacgttgatctccaaaaagttcctcttatcattcatattccaggggaagaaggcgaagtaataaatacggttggtggacaggttgatcttaaaccaacaattttagaattattaggtgtagaagaaagtaagagtttaaatttcggaacgagtcttttttcagaaaatcgaaaagaccttgtgatttttcgtgatggaagctttattacaaaaaacctaatttatacaaagaatacgtgttataacaaagaaaccacgtcaaaaacgaatcgaaacaaatgtgctcgttattttggtgatgttcaagatgaactcgattattcagaccaggttatctatggtgacttattgcgttttattcaataattccagtgtttttctgacaaattcatgataggatttaattggatatactttgcaaagggatgaggatatatggacttagaaagactgcaaatactcactgaagttgtaagagagtacaaaaccgctcttcatatggatcaaaataaaggtgaagttggaagagaagtgcttgatattgtgatgaactcacaggatcttgttttatacggtcatgtaaaaagagcaaaggacattgataaatttcctggtgaagcaattaagcatcttgatcaggcaacctcatacctccatgaaaaaatagatgaacaactaaaacactcctagcataaggagtgtttttttggttgttggactttgaagtaatatgtgaaaaataggaatagtttgcattttgagaagagagcgttgtaacagttgcaatacaatgtcatatagtgataagcttttgctgtttactagattaaaggagagtgaaataaatgacgaatttcatgaagcgactggctcctgtacttttaatgggactagttgtttttgttataagtgcttgttcgaatggtgggaatgaatcgaatggagcttcagacgaaaaagaagcaacgaaatgggaagaaatacaagaagaaggcaaacttgtcgttgcgacttcaggaacgctttatcctacttcttattacgaagaaggatcggataaagttacgggctatgaagtagaagttgtaagagaaatggcgaaacgccttgatcttgacgttgaatttaaagaaatgggctttgacggcatgttaacaagcattaattccggcaaagtggatcttgctgccaatgatattacatcaacagaagaaagaaaggaaaagttcactttttcagaacctgttaagtattcttatggaacagcgattgtaagaaaagacgacctttctggtattaagtctcttgatgatcttgaagggaaaattgcggctggtgcttctacgacggtttatatggaagttgcccgtgagcatggtgcagaagaaaaaatttatgataatgcgacgaatgaacagtatttacgtgatgtagccaatggtcgaacggatattattttaaatgattattacttacaaacactagctcttgctgcttttccagatttaaacataaccattcatcctgatattgagtactatcctaacaaccaacatattgtaatgaaaaaggatagtggcgaattagaaacaaaagtgaacgagacgataaaagaaatgaaagaagacggcacgttgaaagaactatctgagaagttcttcaatggagctgatgtgtcagttaagccagatctagatattgaagaataagtgggagttgtaacaagtgggggaaatacactgggaatatttatttgatgcaggtcttgcgttaaaatcatttccctatgtgatccagggtcttgggttaacgttattaattgcatttgttggaatgattattggcttggttatgggcttatttcttgctcttggtagaatgtccaaatggaaagccctcagatggccagcgcgcctctacatttcctttatgagaggaacgccaattcttgtttttctttatattctttattttggtctgccggttgtaggtatccaattctcggcgttaacgtgtgcattaattgggtttagcttaaatagtgcggcttatattgcagaaattcagcgctcggctctttcatcggttgaaaaaggccaatgggaagcttcgaccgctcttggcatgtcctattggacgacgatgagagaagtggttctgccacaagcaacgcgaatcgccataccgcctctatcgaacgttatgctcgatctgatcaaagcgtcttctttagccgcggttattaccgttccagaactgctccatcatgcgaaaattgttggcggaagagaatttgattttatgacaatgtatatcctcgtagcttttatttattggggagtatgcgtttgtgtttccttcttccaggaacgactagaaaaacgatatcattatttacactaaccctgggtctctttccagggttttttctttatattcttttaatagagtgctcaattgaatcagcacttttattaaaaaaacaaaaatatcccatattcttcatgaagtttttttaagaatgttatactaagtacaataaacaacatagacgattggtcatattggaagggagttcatcaattgcatgaaaaaatatcttaatttattattgattgttggggttctaatgcttgctgcttgtagtaataatagtgagggaacggacgaagaacctgcttctgaagattcagcaactgtagaaacgcaaaaagaacttgaagcgatgaaggtagaagaagacaaagttgtcgcaacggttaatggtgaagagatcaaaggaaaagattataattccatgcttgtacaaactcagcttcgctatacgatgagcggggaagatccatcagatactgaggtagcgaaatcgattgagcaagaagtgatggataatttaataggacaggaacttttacttcaaaaagcgaaggaagaaggtttctctgcgtcagataaagaagttgaaacagaacttgaacaaattaaagcacaattcgatggcgaagaggagcttgagaaagcgctacaaggtcaaggaataacgcttgagcagcttgaaagccagtatgcggatattgtagtcgtcgataaatttgtaaaagaaaaaattggtacacctgaagtatctgatgaagaagtaaaggcattttatgatgagcaattctcaaaagatgctgaaaatcccccttcatttgacgaaatgaaagatcgaataaaagactatttggttgaaacgaaaacgcaagaaaaagttcaggaaatgaaagctgaactgatgaaaaaagcagaagtgaaagagaaattataggtcagcatagagctggcctttttctatgatatacatagccattaaattgaagcagggagagataaagttatggatcatgtaatcgctgaactccgtacatatgtgaaacaaaaattagaacaggaaggaagtggacatgattggtatcacattgatcgtgtcgtaaaacaagcgcgtagcattgcaaaagaagagagtgctaacctttttatttgtgaagtagccgcactcgttcatgatcttgccgatgataaagtcgcttcatcagaacaagctggattagaagaagtagagcaattgcttttaccattaaataaggcggatcgcgagcacgtattggaaattattacaaccatttcctttaaagggggtaatcgtccacctgttcgtacgctcgaagcaaaagttgttcaagatgctgatcgtttagatgcgataggagcgattggagttgccaggacgtttgtttatgctggctcaaaaggagatttaatttatgatccatcaatacatccgcgtcagcacatgtcagctagctcgtatcggaatgaaaagtcgacggccatcaatcatttctatgagaaattattgaatttaaaagatttaatgaatacgaatacaggtttaagaattgcagaagaacgtcatgaatttatgacatcatttttatcacaatttcttggagagtgggaaggatcgaaatgatgatcattcagccaatgacagaagatatcgcaaaaaagattcaaacgtggcaatatgaggagccctattccttgtacagcctaaatgaagatccagaagtgttatcagaacttatgaccggctcttatttttcagttacagaaaacaacaaattaatcggctatttttgttttggaaagtcagcacaagttcctgctggttataaagaaaatgcttatgtggctcctttgcttgattttgggctgggccttaacccgatgcatactggaaatggaaaaggacttcgttttgttcaagcgggtctcgcatatgcgtgtgagaagtatgggaataagagcgttcgacttacggtagcctcctttaatatacgagcaaaaatagtgtatgaaagggcaggatttacatatgagcaatcctttttaaaagaaagtgagagcggttcgacaacctttgaagttatggtaaaaaagatatgaaattagggagaaatgggctgttgtgacaaacactggattaaactgtgcaaaagcgggaataacagaagtatacaagcaagaaagaacaggaggaaggtttcatattcatagtgctataactaaaatagaatcgaatccaattggtacaacttgtcttattcatactaattctgacagactataggaagtttggtcgaatgcgttttgattcctccgagatttgggcataataataatgtattggcatgaggaggaatgaggcatgtatgatgcaattgaaagaaagcgaaaagaaatgttcgatatggcgggacgttacggctttgcatcagagagaaccattcgctgtagtcaggagttggaccgattattaaatgccttaatgcaaactacacaacataatgaggaagtattgtgaaacttaaatctaattttttcttcctgtagggtaaaataaaggaggaaaccgtatgaagtttgatcttaaatcaattctcacaaaagagttgtttgattggatagaagaacatcctaagcgcaatcagttgattgaatccattcaaggagagatctttcaatccgtcgttcatttccgtgagtggaatgactctgattataatgggaacgatgactggattctgtttgcgcttcgaaatgaagaagtgtggcaagatgaagtcgatccgatcgatcagtgtgaaagccgttagaagcacggcttttttttgtggtattttagaacttaatgtagatttaagcaggaatcatttgcttggaaagagaaaaactacatactatggaatttatccggtgtacgtagggggacttatggtgaaacattcacaagacgttcttatagataagcaacagcttcacgaacttcatagcaattatcaaacgtataaatcgctatttgcccattatccaggtatgatgtaccttttagatcacaatggactcattcaaaatattaaccacttcggtgttgcattatcaaagcattacaacgtcaaaattaaaagtaagcattacacaaactttattctgccttcagaacatgacgaagttaatcactttttttataaaacgcttcaggggcaagttacacattttaatacggtttttcttacacccgatcaagagccgttcgaggttgaattagttaatatacctgtttatgttgacgatgaagtaaaaggtgtatttacgttcgttcgagatattacggaagaacgagcagcagcatttgctctacgagaaagtcaggaaaagtaccggttgattgctgagcatacgtcagagttaattagactagtgaatgttgagagcggtatcattacctatgcttctccttcccatgaaaccattcttggattcaaaactgaagaatataccggtcagtcgttttatgaagacattcatcctgatgatcaggatgccgttattcatttgctacatagcacgaaagataagccagcagtcgcagaatttcgacggaggcatgtaaatggaaactggatcacgttagaagacagtgcgagatccataccttatggcgtcaatggagagagaatgaatgtggtcgtctcaagagatattactgagaaaaaacgagctgaacaggagcttcaaagcacgctaaagcagttaaaagatttaaaatatgcccttgatgaaagtgctctagtttctgtgacagatgagtctggaaagattacttcggtgaatgagaaattttgtgagattacggaatataccgaagtcgaactgctcggtcaaacacatatgattcttgattcagggtatcatccgaagtctttttttgacgaaatggatttgcaaattgaatcgggtgcagtgtggaaaggcgaaatcaataacaaaacgaaatatggaaacgatttttgggtcgatacaacgattgtgccgttcactggtgagaacggagaaccgtaccaatatgtttatattcgaaaagatattacagatcgtaagcgcgccgaagaactgctacgaacgtccgataaattatcagttataggtgaactagctgctggcgttgctcatgagattcgaaatccattaacttctcttaaaggctttacacaaattttaaaatcaaggctagatagtgacagtgatcaagagtttattagcattatgcttgatgagttggatcgcattaatatgatcgttaatgaatttatggtgctggcgcgacctcaggctttagctcatgagaaagcgaatttacaagatttacttcaaaatgtccttaccttgattgaaacgcaggcaacgttaaacaacgttcaaataatcactagagcgattgaaaacattcctaacatatcctgcaatgaaaatcagataaagcaggttcttatcaatgttattaagaattcgatcgaagcaatgccgaacggtggagaaatcatactatcactttttcctattaaaaatgaagttatcattgaagtgagagataatggggaaggcattccgaatcaccagctaacccatctaggagagcctttttatacgacgaaaaaaaagggaaatggccttggtttgatgatctgtcgacgaattgttcaaaatcatcaaggcaccttgttaatcgatagtaaagaaggagaagggactgttgtaacgataaaactcccttatcttctttctgatgaatcgcgctgataaagcgctttttcttttgtgcaactatttacttaatataagtaagcgcttacaattataaaaaagaataattgtattaaggggcgtgttgagaatgagaagcgagacgagttatcgaatgcttgcctttgaaaaattcaacgctgaaaagaattggtcagaaaacaatcgcctttttaattattccattgcaggtttcggaacaatattttgtattttatcgatgatattttaacgaacagtacgaatgggcttctcaagtgaccacacttctttttattaaaagagaagctacctttttgagaagtctttttttagtggtcatctttccattcattatggctaaagtgaaaggttcgaacctcaaatggagtcgtttgataggctttagcgattccttcaactgttactaactctttcggaacccgctttaatttaacatgaaacgactgctcttcattaaataatgggtatgagatatgaatgtttttcttagaatgccagtgtgtaagaatggcattatctttcgttagaaaataaaaagattgtggaaatcctttcttaaaccacgaaagttcttcactttttgaaactccaggttcttgaaagcaggcgtatagtgacaagtcatcacaaaattgtagtaattgataatgaaaggtgagtagagattcggaaatgcgaaaagtttctagcagttgattctgtctagtgtcctcttctgcataaaacgttttagcttccttagacgttgcgttatgaaaaaacgattgataatgtttgctacaaagaaaaccgccgtaagtcgtcttttttataacatcttctaatccttttttgtaaaaggttaacttaggagcgagtggaaaatctagaaaggtatatggggcctctcgtcgatcgttccaaaacggtacgtcatcgagcgggatccatccacaatcatgatggcgaatcgcatgtaagacatcttcacgataaagcgaatcgggccagtattctttacgtaacgctgctgcaaactgtcccgataaaagtgcatgatcatgctggctagtcatcacaaaacaatcgttctcctcataaacaatcatccaatccatcctttcaagaaaagcgtattagaagcaatcgagaggctggtcaaagaagctagttaaatagttgaccgtttagcctcgacaagcggtggaaaccctcgatttgaaagcgccaacaaataaaccgagataaaaaagcgagtccattaaggagcacttttttgtatttctttaaaattaacgcgtgcatttgtcatatctatttttgagattacaaatggttttgtaatcgcttgggtgaccatatcatcttttttaggatcggtataataataagaaacgacgagttcattattcaccttctcgatgctttcgatgttaaccgaatagccgcctgtgggcatctcaccgcgagtaatgataatatacagttcttcacctgatggaatcgtaaaggtcgatttctctaaccacttttgttggacggtcgtttgaatatcttttggcgcattttgcatttctactgtttcaaaagtgatttcttccttcatttcatctcctccacttgaatcgtctgtagactgtgacgaattatctccacatcctgccaaaatgacaaagaccactgatagtagcaataatattggacgcaatgtcttacccctttctactcgtaacctatatatttagaaaataattacatgaagttacaatactatcttaagtttagcgaatttcaataagcttggaaagagtaaggagattaaacgattacaatttctttacatagggtattgaataattgtgagtaaatggcgtaacgaaaggagaatagacatgcaaaaagaaattttaagctttttaaagaacgtggaagaacccgtgacaacaagagagattatggaatatttatctgggaagggatacaaccccgatgaagaagagcttgttcgaattataaaagatatgcctcagggtgtggtgaaagaagaatacgacgcatctgttattgatccttccccatcagtagtttataaagcaggaccgaacgcttaacgattcattttcgaaaacgatcgacgaaatacaaaccaaagattagcaaaaatacgattccaactccatagaggatctccatgatcaagtccattcgataacatcctttcgaaaagcttaatgtaagtgtatcaaacgttcttattccttacagatttttttgttttgttcgaatgaggaaatgatataatagtggcattgagttaagcatggaaggatgtcgtcatgaagaattggaagtttgatagctctaaactgatcatcttattttttattgtgtttattattgtaggcgctgtcaacgtaatattcagcgatcggaaaatgaatacgagtgaatacttactgagtgaaaaccagcgagacgttgtttcacgatctgaaacgcaacctaaagtaccggtcggagcccttgtaaatagtaagctcgctgaaaataatgccatcactcttactgctaaattgaaatatgaaggggaagaagaaacgggaataaaggtagtcgaaaatagtatgttagattatcagattacggaacatcaaacaaacgatattgttatcccttatacatcccctgacccatctgttctgaaaaacgtctcaacagatgatattgttgaaggagagtcactaaagactgaaccacttgactctggtgcttaccaaatagaagtaaaggtgccgattataattgatgataaggaagagagtttcctgtttcgtattcccgtcgaaataactccataatgagcgctaaaaaaacttccaattaggaagtttttttagtgactatttttgaatggacgacgtagggttaaacatggtagtagaaactgatagaatagaagtatatgacagaagtggggggctatatgaggaagctaaatctctataaaattattggaattttctcatcttttgcattgtttcttatcatttttaatcaactcaagagtggagaaccgaactttaaggttgatgaatctttgtttgaggtttatgaatccgctaaccaatgggaggattctatgaatgatctgatccctcagcttcagctagctagagagatcggagcattgaataacagtgatcaccttattcccatattggcaaatgatcgtgatcttgttatccataatgtgatggtaattaattttggagctgtgtacatcacatactctttctccttgaaagaaaatgatcagccgtataatttaccgacctttcatatcggttccttgcgatttgaaggcaccagcgatacggatcaatcctttttagttagtcagcaggaagtctcaaaccagacaggaaaacagccagcggttattaatcatcgtatttatcgagcagaaattctatacccgaatagtgaagaggctgatttcaccgaagaatttgctcgcttttcagatgcagattcggttatattcgagaatgtgtatgcacaggatgaggatgagaaaataaaacttgaaaatcaagagcttgctttggaaagtgatttttcgaacaatatttatgccaaagcagatctgaatgaaacagttcatacagatgaaggcgattttactttcactcattttgaagctggtctcaatgcgaataaattatatatgaaaggcaatgatgatcaacatacacgactagttatgacgaatgcaacagaagaaggtttttatccatttgaacgggttttattgaaggatgagaaagggacttatgtagcgctggaaccgtttcgttcgttacaagagacgttttcttataaagtaaatgaagttgtttttaataaagatggcctcatttctaagaggattacaaatgaggattgggaagctatacaaagagggaaaaaggtcagccttggagaatatagcgggttaacttatactgttcatgctgaaagtaatggtgatggcaatcagctggtaatcagaatagatggaaataaagatcactcgccccaattattgaatcaggtttacatggaaagcagtcaagcttatgaagatcgtctaggttctatcccagaagaagagcgagaatcttatgaacaacaaaagcctgtattgttaaaaataaaggataagaataaaaacgatattctgatctatcaaacttcatctacagaatcgccgaaagaatttcggattgaccttgattatgagcatttttcttcaggattgcctgcggttatgaccttatcaaatttacctaatttcgaatcagtcgatgttgatttaaaagggactcttcaattaaatgaaaaaaagtaatagccattttaaatttgtagtttggtttttatagaatcgggaatattctttatcaaaccccctaagtagtttgaaagtgattttccccctgttaaccgtgctcaaatgagtacggttttttttattatttttcccataagcagtgcgattgtgtgaagcgtttccattatgcggaattcgtggtaatcttttagaagagagtcgataatagtaagtgaaaggatgaggcatttggcgaagaaaggaattttgacggaacttaatgaggatcttgtatctttttttgaaggagagaagcttgttatgctttcaacgattgaccatgaaagccaagctccaaacgtatctgccatatcgtgggtgaaatgtttagataagaacaatattcggttttcagttacaacaaattcacgtacgattcaaaatgtgaaagaaaatcctcatgtagtattcacgatcattggattggaaaccgtgtattccattcatggaagtgcctcaatcctagaagatgccatgaaaggtgtttcactaaagcttgcgaagattaatgtaaatgtcaatcaagtgattgagacaatgttttggggcgctaaaatcacaatagaacctcaatacgaaaaaacatataatcaaaagaaagcagaggaattggataaagaagtgtacgagtccttgttgaaatagcaacaaactttcttatcgcaattttttgtgatttaatggagtaaacaagcatttcgtgctatcaccctgacgaaggcaccaggaaacgaggttgattcccagatggagtgggaaatgattaaagactttttaaatgaagaaacaatcaaacaatggctaggtcaatatcgtgctcttggaccattgccaggaattttactccctatgctagaagcggtcattccgatattgccgctctttctatttgtggcaggcaatgcagcggcgtatggtttctggtacggctcgttgctttcatggcttggtgcatctctaggtgctctgattgtttttatggtggtcaggcggcttgcaagacagcgcttcatgcgagtggtaacaaaacatgccaaaatagaaaagacactgcgctggattgagcgacatgggtttgggatggtgtttttgcttttatgttttccatttacgccctcggctttaatcaatgtggtagcaggtctttcgaatatgagtattcgaagttttgtattagctgtattacttggaaaaatggtgatgatctcgatcgtttcttttattggacatgatgtttttgcgttaattcaccaacccctgcagatggttcttatccttgtagcgatcgttcttctttggggggcaggcaaattaattgaagtgaaactaaatcagcgtcctcgtaagcatcgcaccgaggatcaggcgagatagaagaaaagccatgccggttacggcatggcttttgcgtgtttatggaatggaaaagatatgttcaagagttctaagatctccgtttctaaacgctcgtctccgcttttcgtgtctagctccagtgggcagggtctcgatcgcttcaccttatcaaatgaacacaaagaccgtgttcttttgataaggctccaccgcttgtcgaccctaaacgcccacttccgcctttcgtgtctagctgcgactcgcagaaactacgatatttcacactttcaccagaacacaaagggcgtgttctagttcaagagttccaatatctccgtttctaaacgctcgtctccgcttttcgtagatccagctgcagcgcccagacactctgccacttcaccttttcatccgaacacaaaaaaccgtgttcaaatgaaaaggctccagtgcctgccgtgtctaaacgggcgcttccgcttttccaactaaaatatccgtttcttgtctctttcttctttcagtatttcaacggcttctcggaagcgttgggagtggatgatttcgcgttctcttaggaaggcgagggagtcgtttaggtctgggtcgtctgataggtcgatgatccattggtaggtggctcttgctttttcttctgcggcgatgtcttcgtataggtcagcgatgggatcgccttttgcggcgatgtagcttgctgtccatgggacgcctgctgcgttgtggtaaaagagagctttatcatgattggagtagtgggcgccgagcccggcttctttcatttggtctgctgtggcatcttttgttagtttgtataccatcgtggcgatcatttccaggtgagcgaattcttctgttccgatgtccgttagtaaaccaacaactttatctggaattgtatagcgctggttcaagtagcgaagagctgcagccagttcaccatcggctcctccatactgctcgattaaaaactttgctagcatggggttacatgtgcttactttgactgggtattgcaattttttttcatacacccacatataatgtacatcctttctgagttagacttgccacggccatggtgcatctttccaatcccatggatagtttgaataactgttcccgtattgttgcaatggaccatattctttttcatatcgcttcttaagctgttttttcatttttgcgtactcattgaattgttgaatggcctcataatcatttggatgggtatcaaggtaaagggttagatctacgagaacgaaatctacggcctgaagttcttccaatagctcataatactctttaggtaattgtttttgagacatggtttactcctcccgctttgaaggataagggtacggatcatagaaagctttccagagcgttcctttacgtagcgcttcacgagcagagtattgttcaagaccaggcggctgaaaccccatgtagaggttagggggggttgagtaagatttcactcgaatcggaggacatggatcaaacggactgacataaggctcgtaaaactttctgtgtgtatacatttagtgacctccttctgtacgaatctctactcttaagatgtatgaacgaaaaaagaaatcatgaatgacaaataaaaaagcacttccaaaagtggaagtacttcttagtctttacattttattaactgtattgttccaggttgcgagcatgttctttaagtcgtgaagatctgatttgaatggatagtcagttgaaacactgcgcttctgcccatcatctagcttttcataactatgaacaaattcggtcatgtctcgtgtaagccgatttaattcccatttaaacgtttcaaattccttttccattttgaaaactcctttatgatcaatttcttatgagtactatacccgtgcgtagggaggtggaaactagagagtgttccatttggtattaattgtcgtttggtatgcgaacgtattttcttatcttgctattcaattcattgaaaacatgagataatagacaaagaatttacggtgtaggaggtagaacaaatgacagtaaaatttgtcattggtcgttcaggaagtgggaaatcgaatcattgtttaacggaaatgcaaaatgaactaaccgatcggccaatcggacaggatatgatttacctcgttcctgagcaaatgacgtttcaatcagagtatgaattagtacataatagaggtttaaaaggaatgattcgagcgcaggtttttagtttcactagacttgcctggaaagtgcttcaagaaactgggggaatggctcgtcctcatttaagtagtgtcggaacaagtatgatgcttcgacagatcattgaggaaaataagcagcaactccgaatttatcagcgttcttctgagaaaacagggtatgtggaacagctaaatgatatggtaaccgaatttaagcggtattgtctggaaccagatgatatcaagagctttgccgaggacttttatgcagaagatgagcggaacttgcttcgagataagctctatgacttgcatcttgtttacgaagcttttcaaaaaaagatgataggtcactacctcgattcagaagactacttagcactgctagcggagaaagttgaggagtcagactatctaacgaacgctacaatttggatagacggctttcatagttttacccctcaggaactactggtcattcaatcattaatgaaaaaaggaacaacccttacgtttacgattacgatggattctgaaatgatcccttctgctattcatgaactcgatttgtttcatgaaccaggaaaaacatatcaaatacttcagggaatggcgaatgaagaaggtgtagaaatcgaggaacctctcgttttaacaacacaaaagaggtatcgaaacagtgagatcgctcacttagaagccaattatggtgaacggccgccggttgtttatcgtggagagttgcagcacatacaagttcatcatgcggtgaatatacgttctgaagttgaggcagtagcacgagaagcgctaagacttgttcgagatgaaggttatcgttacagagatatttcaatcatggtccgcaatatgtcaacttattatgaacttgtggaaacgatattcgaggatcacggtattccaattttctcagatcaaaagcggacaatgcttcatcacccgttaattgagttgattcgctcaagtttagacattatccagtacaactggcggtatgaatcggtttttcgatgtgtcaaaactgagctattgtttcctgatgatacaggggaaagcattgaaaccattcgcgaacggatggatgagcttgaaaattacgttatagcaaaaggcatcaaaggctatcgttggaaaactggtgaaagatttaaagcaaatatttatcgtcagttagaagataaagaagtcatcacatccgatgaactcgaaaaaatggaagatcgcctgaatgaaacgaaagactggattgcgacgccgcttgagaaatttgagcgacacatgacgaaagcaaaaaccgttgaacaaatgtgcgaaattctttattatcttcttgaaaattgccacgcagcggaaaaaatcgatcgtttaaaagagcaggcagaaaagtccggtcaccttgccaaagcacgtgaacatgatcaggtttgggacgcggtgatttcgctacttgacgaaacagtcgaattaatcggtgatcagaaactctccgtggagcaatttacaaagttgcttgaagccggaatggaaaatatgaaatttgctctcgtacctgcttcacttgaccaggtagtgattggaagcattgatcgaacaagatttactgatgtaaaatgtggctttcttttaggtgtaaatgaaggtgtcttaccggctcgaattcaggaagatggactgttaagtgagcaggatagggaaaagttagaagaacagggaattcagttagctcctgggttgaagcggcgtttgcttgatgaagaatttttaatttaccattcgttagcaacaccttcggattctttatgggttagctgtccgcttgctgatgaagaaggaaagggtctccagccttctatcgtcgtgaatcgattgcaggagatgttccctgatcttgagctggggctaaaatttgcagagccaggtgaagaagccactgaagaactctcatttataacaaacccatccaagacaattgggcgactcactggacagcttcgacagtggcaccgagggtatccgattgatccaatttggtgggatgcatacaactggtttatttcggctccatctgagaaagatcgtgtacgcttaattgatagtcttttttatcgaaataaagccgatcgtctaactgaatcaacaagcagaaaactttatggtcatcaaattcagacgagtgtttcaaggatggaaagatataaatcatgtgctttctctcagtttgcttcacatggtttacgcttaaaagaacgggcgacattcaagcttgaagcacctgacatcggacagctgtttcatgcggcgctcaatatgatggcagaaacgattaagcaacgtcattgggattgggcgaaactttcatctaatcaatactatgagctttcaggacaaatcgttgaacagctcgcaccaaagttacagaatgaaattctattaagttcaaatcgctatcactatattatgagaaagctaacgcaagttgttgggcgcgcctcgtccgttcttggacaacaggcaaagaaaagtgggtttcaaccagcaggactcgaattaggatttggtcccaatcaagagcttcctccaatcgagttcacgcttaaaaatggtgttaaaattcagctcatcggacgagtcgatcgagttgatcaggcactgaacggagaagaacttctccttcgtattatcgactataagtctagcggtacatctcttgatctatcggaagtgtattttggactcgccctacaaatgctcacgtatctggatgttgttatatctaatgcgaacgtctggcttggaagagaggcaactgctgcaggtatgctttattttcatgtccacaaccctatgctccaaacgtcagcgcctggacaagcggcaattcaacaggagcttttcaaaaagtttaagatgaagggacttctccttgcggataaagacgttgtgagcttaatggataacgatattgaaacgaagaaatcggatattatcccggccgcactgaaaaaagacggtagcttttacaaaaactcttccgtcttatcttctgatgattttaatgcgcttcgttcttatacaaggaaaacaattcaatcgattgggtcggaaatttcagatggccgtattgagattgatccatataaaatgaaagatcgaataccatgtacgttctgttcttaccgatccttttgccagtttgatcaggcgatggaagataatgcttatcgtcctattgctactcaggatgatgaaacgatattaagacgcatgagagaggaggcagatgatgataactaaacctgaaggatcaagatggacggatgagcagtgggaagccattgcttcaagaaatcaagatgttttagtagctgcagcggcaggatccggaaaaaccgctgttttagttgaacgaattataaggcgattagccgatgaaaatgatcctgctgaagttgatcgaattctagtcgtaacatttacaaatgcagcagctgctgaaatgcgccaccgaattggagaagcgctcgaagaaaagctgaaggaagatccttcttcgctttatttaagaagacagctttccatgttaaatcgtgcttctatttctacactacattcgttttgtatggaagttcttcgccgctattattacaagatagatcttgaccctgcttttcgcgtagctgatcaaacggaagccgctttacttcgtgaagaagcgatggaagagctttttgaagagcactacagccagaaagaaaatgaagcgttttatgacctcgtcgatcgctatagtagcgatcgtagcgatgtcgatcttcagcttctagttgaacggctttttcatttctcttcaagtcatccttggccgaaacagtggttggtagatagtgtagatttatataaaaatgcaggtgataagcgcttcgatgagctgatctgggtagaggaattaaagaaagatgttgtgcttcagttagaaggaatgcgtgaagtgcaggaaaaggccatttccatttcatcttccccaggtggtccagaaccgtacctttcaaccttggaagtcgagcgcgaaatggtgaatggacttctttacgcttctaaggaatcatgggaagcattaaaaaacgcgtttgaagctgtttcatttggacgcttaaagccttgtaaaggtgaccagtttgatcctgagcttattgacgccgtcaaaggaatgcgtgatcgggttaagaaaattgttcaaagtatgaaagaagatctgtttcaacgggaagcagaggagtatctcgaggatatccagaaacttgcgcctgttcttgaaacgttagcttctctcgtaaatgaatttagggataagtatactgatcttaagaaagaaaagggacttgttgactatagtgaccttgagcattactgtctttcgattttattagatgaggcatcaacacctgataaccctatcgcttcaagtgcggcgaaggaatatcagacgcagttcgccgaagtgctcattgatgagtaccaggatacgaactctgttcaagaaacgattcttaatgccattagccgaacttccgaacacggtgggaatcgttttatggtaggtgatgttaaacaaagtatatacaggtttagactggctgagcccgggttatttctagcaaaatataagtcgtttggccgctcttcagaggagcctactaaacggatcgatcttgcacgaaactttcgaagtcgtgaggaagttttaaatagcaccaactttatttttaaacaaattatggatgaacgcgttggggaaattaaatatgatcgtgcagctgaacttattactggtgcagagtatcccaagtctcaatcggtggtaccagaagtccatgtgattgatcaaagctctgatgaagaggaagaagaggtcgaaaaagttcagcttgaagcacgtctgatcgcatccaacattaaatccatgatgggaaagagcgaaaacgagcgaacgaaaatatacgaccgaaaagaagatcgcatgagacccattcagtacagagatatggtgatcttaatgcgcgccacttctagctgggcaccggttatgatggaggaattaaagcaggcgggtattccatcttattcagaccttgcgacagggtattttgaagcgacagaagtagcgattatgatgagtctgctaaacgtgatcgataatccctatcaggatatcccgctcgcatctgtcttgcgatcaccgattattgggttatcggaagaagaacttgcattgattcggataaatgagaagcaatcaagttattatctcgccatgcaggcgtattgtgagacagagtcggatgagctttcagagaaaataacacggtttatcgatgatttaaatcgttggcgagaacaggcaaggcagtcgtcgttaagcgaattaatttggcaattgtatcgtgaaacgaattactatgaatttgtcggcggaatgcctgctggtttgcagcgccaggcgaatctgcgtgctttgtatgatcgtgcaagacaatacgaagcaacttcatttcgtggattgttccgctttcttcgctttattgacagaatgaaggagcggggaagcgatctcggaacagcccgtgcgcttggagagcaggaagatgttgtgcgcgtgatgacgattcataaaagcaaaggacttgaattccctgttgtctttgtcgcaggcatagcaaagcaattcaacatgagagacatggcaaaccaaatgcttctccataaagaattcggtttagcaacgaaatacattgatccaatcaatcgtattagctatccgacgttgccttactttacattacaaaagcgaatgaagcttgagctattagctgaagaaatgcgggtgctttacgttgctttgacgagagcaaaagaaaaattaattttagtcggcacggtaaatgactgggagaaagaattactctcctgggcagaggcaccaggagaggagtggctcctttccgattatgagcgctcaacaagtaaaacgtatttgaactggattgggccagctattatcaggcatcaagacctttcttcaataacagagggaatagctagtttcccgaaacatgatgaggtttttcatcacccatcacgatggtcgttaacgctccatcaagcttcggatttttctcaagttgaagaagaagacgttaagaaacacgaggaatacgaggaactccttcgaaggaaagcctacgttccagaagaaagtgcctttaaagacgttgttcataatcgtcttaattggacatatccacaccaggcagctgctgaaacaagatcgaagcagtctgtaacggaagtgaagcgtcagcgggaaattttccaggacgaacgtagtgacgatcgcctagtaaaaggctttagccaatctctaaaagaacgcccccgctttcttcaaagtaaaaagcttacgcctgctgagcgcggaaccgcgatgcatatcgtcatgcagcacattgatttacaacagcggcatgaagaaaatgatattaaagaattaatcgcaaagcttgaaacgaaagaattgttaacaaacgatcaggctcaagccattgatgtgaagcaaatcaagcacttgattgattctgatctaggtgacaagatgagaaacgcggtcgaaatatataaggaggttccctttagtcttggggtggattcaaagtggatttatccagatttcaaaggagaccaagaaacggtcgtgttacagggtgttattgactgtatcttgcgcgatcaacacggagaattacgattagtcgattataaaacagacgtgattgaaaatcgtttttcttcagagcagcaggcaatggagacaatgaaacgtcgttatacaacacagcttcaactatatgaaaaagcgattaatgagatttggggtttgccatgtaaagaaaaaattcttttcttttttgatggtggcaaatcactcttaatcgattaaaaatagccgggcgaatgtccggcttcttcgtttcaaaaataaaacgataaggagtgagaaacatgaaattgcttcataccgctgactggcatcttggcaaaacattagaaggtagaagccgcctacctgaacagcgagcgtttcttgaagagcttcaaatgattgcagatgaagaaaatgtagacgcgattttaatggctggtgacgtgtttgataccgtcaaccccccagcagccgcagaaacccttttttatgaagctgctgtgaaattaacgagcagaggcgagcgtccacttattattatttcaggcaaccacgacaatccagaacgcttatcggcttcacgtccgttagcccatacaagtggcatcacgattataggatttccaacaacggatccggttaacattacagttagaaatggacaaaagctttctatcgcagctcttccttatccgtcggaatcgcgattaaatgaatgcttaacagatggccaggaagaagatgcactccagctcgcttatgacgatcgcgtaaaaaagttatttagcgatttatctgaggcaggtggtgaggatgctgttcatattgcgatgagccacatttacgtagctggaagtcgtgaaagtgattcagaaagaccgattcaagttggtggagcttataccgtctctgccaattccttgccagaacaagcgcagtacgtggcgcttggacatttacaccgccctcagacgattacgaaaggttctgcccttgcccgctattcagggtctcctctagcctatagcttttcggaggccaatcaagccaaatcagtgacgattattgatgttgagccggatggactagctcacattagtgaaattccgttacagtctggaaaaccgcttgtgcgctgggttgcgaatgagggaatcgaacaagtgtatacatggttagaagaaggaaaagacgaggaagcatggatcgatctcgaagtgcatttaaatgatacgctttccattgaagaaattcatcgtcttcgaagtcaacataaaggctttatacatattagacccgtttttaaaaagaaagaagaacagcgtgaagtgtcgtatgctaatttaccaatagaagaactttttaaacggttttatgaaaagcaaacagatggtgctgaaccagatgatgaacttgtccagctttttctagaattatcacagtcagaggaagaggagtaagagaggagtgagaaaatgagaccaattaccttgtctgtttcaggactgcatagttttcgtgaaaaacaagagattgactttgaaacgctttgtcagggagggattttcgggatttttggcccaacaggtagtgggaaatcctctcttcttgatgcgatgacgctagctctttacggcaaagtagaacgggcaacaaataatacccaggggattatgaaccatgcggaaggtaccttatctgtgtcattcacgttcgcactgagtgacttacgctatcgggtagaacgtacgtataaacgatcgggtgatgtatctattcgctctgctaattctcgtcttatcgaaatcggagaagagaatacggtactagctgataaagaccgcgatgtttcccaaaaaatccaggaaattctcggtttaacaatcgatgatttcactcgcgctgttgttctacctcaagggaaatttgcggagtttttatcactcaaaggaacagaaagaaggcagatgctccagcgcctctttcagcttgaaaaatatggagatcagttcaaccggcgattaaaatcacgagtggatgagaaaaaacattatttaaatgaagtatccgcggagcaaacaggccttggcgatgcctcaaaagaatttcttaaagaagcgaagaatgctttggatacggccgaaaaagcagctcaaaaagcaaaggaagacctcattttagctgaaaagcaaaaagaacacgtgatggaaatctggaaccttcaacaacagcttgcggacctccaagctaagaaaaacacgcttgcaaaaggccaggctgaaatcgatgcacttgaagaaaagatcgcccaagcaacggcggctgcacaaataaaaccatatttagatgcggttgaagcgactgagaaagaagtgcaggatgcaaagcttcgatacgaagagacgaaacgtgtattagaagaaatgaagtcattctttcaaacaacgaaaaaagcttacgaggaagaacggtcaaacaaggagaagcaagagccgcttcttattaaacaactaaatgatcttgagcgaggcttagcacttgaaaaagaaatcaataagcttaacaaacagttaaaggacattgaacagcagtctatactacatgataaagaagcgaaagcggctgaagaggaaacatcaaaagcgaaacaagatttaaagaaagcgcggacgcttcagtctgatctaaatgaagaacttacaagccttcaggtcaccccagaaaaacgaaagaaaatgggaagagcacaaagcttaaagcaggagttccagtcgctcagtaaacagcttgaatcggctaaaattgaagaaaaaatgcaggacaatgaacaaaagcgactgaagcctctttacgaggaaaccttaaaaaatctgaatgaaatgagagagcggtataaaggctattaccaagctattctttcaacttaccatgccgtttcttcccacaaattaacgctcgaacagcacattcgaacggttcaagaggaagtcgaacataacgagcgtaaactagatgaaagtcgaacgcatgccattgccattcgtcttgcaaaagggttagaagaaggcgacgcatgcccggtttgtggagcgaaggaacatgttcacctggcagatggagaagatgatacaggggaaatcaaagatctcctacagcaaaaggaacacacgcgtgaaacgttaaaagataagcttcaatcagcgaagcagcttcagtatcagctagaacaaatgtctgatgcgatgacagtgcaagaagaaggattgtctaacgttcagaaggaagacttgaacgaagtgaagcgtaacttctcaatagaagaaattcttactgaaatgaagtcccttgctcaagatgttcgcgaattagaagagaaagtgaagttttcagggaaaaacattcaagagaagcagtcaaaagtttctgagtatgcttatcagctgacacaagttcagaacgagcttaaatccaagactgagaaacgaatggatttaagcaaagaaacggcttcgattgaggaaaccatccagaaagaattatctctttcagttcaccaaattgaagcggaagtggttcaaattgaaaaaatggatcaacaagcagacgttatacgtgaaagactttcgaaaagcggtccctatatcgaagcaaaagaacaacgtcttcaggagcttcaggaaaagatgcagcagtattctgtccgaaaggtagagttaacaagctcgattcatcaactatccgaacaattgaaaaaagcgaatgcagattatatcgcgattgtcggaaatacgtctgcacaagaaggtttaacgcaagtaaataagcagctaaatgagattcgtcaggctgaaaaaagttcgctcgagcaactgcaacatgcacaagaacgctatcagcaaactgaaagacgtgctgctgctgatgagaactataataacgatgcgcaacttcgtttaaagaaagcattagaaacctatgaagcggctgaagcatcttctatattcgaaaatcgaactcagattcgaaatgctgaagtatcccaggaacagaaacttaattgggaaaagcgtgtggaagcgtatcggaatgaatggaagcaaacggagtactcaatcgatgagcttaacgaaaagcttgcgggaagaacaatttcagaagatcactataatgaaacgatccagctcgcaacaagagcaaacgaagttcgagaagaagcgctctctcaatttgctgcagcacgtcatcatctcgatgatgtgacaaagcggcatgatcgttacatggaactggagacggttcgaaaaacagttagtgaagaactcgaaaagctcggtaagcttcaaacagttttccgaggaaatagttttgttgagtttattgcctctgaacagctcgaacaggtgagtctcgacgcctcacaaaaacttggtgatctaacctcccaaaggtatgcgattgaggttgattcagctggaggtttcttaattcgtgatgatgcgaacggaggagtaaagcgacctgtttctaccttatctggaggcgaaacgttcttaacgtctctggcgctcgcacttgctctctctggacaaatccaattaaggggagcgcatccactgcaatttttcttcctggacgaagggtttggtacactggacgaatcgctgctagatacggtgattacggcgcttgaaaagttacaaaacgagagtttatccgtcggtgtcatcagtcacgttccagaacttagggcaagactgccgagaaaagtgattgtctctccttcagaaccatctggtcgaggaagtcgaatcgaaatggaatcgttgtaagttcaggtatggttgcgagaataattcttgttagccaataaattggggttttggataatatatttcgaatttggccaataaaaaggaaaaatggccaatatatcaagattttagccaataaagtgccatcccggccacacccgtaccagtaataagcacaggtatgcttgggcaggtgcttttaacagagagaaaacatgtccttcaaacatgttttctctttttttcttgaaagatactgtcaaaatacgagagtttatgtaaaaatatgaatagtagttgaggtaacttacataggaggaacatggatgtcgcattctatgagactagttttaggaagttttaaacctttttcacactttcgaccacttcactcagcctatcggttgaaagggtcgtggtggcgcttaattttactcgctattttttcttttctaattgttgggattacgtcatttatgaacattaaatatgctggagaaatgccagaatatacggggattgcgcctgatgagcgtttgctttttgtcctcagtgaagttatcacagatggtctgcttggtgttctgacactaactgtcatcgtggtaggaggtgcgctactgtactggccgttttttcagcaagttggcttcaaaagacttgcttacataaatagctatgttgtctttattcttttaatcggtatgcttcttcagctaccctttatcccatttcttcatgaaccgtcgctcatttccccgtatagtctaggtgtatacgttgatttgctaacaaacattccattctggctgtattttagctatagtttgtcgctatttcttgcatggggcacgtttgttcagtatgcggcgattaggcagagtactactgtctccagaggatacgctcttttctggattatcattttgaacgtatttatggttgcgatcacggcttatatgagaacggcattttaatgaaaaagttggagggtcaatctgtgaaacgtaagtcactgtggattagtattagcgttacgcttgttatacttctttttattactgcgaacacgctggtcatacagagtgtcattgcaggagagaagaagcttgataccgtcacggtaaaagggaagacgtatcaggaactttcaacttttgaagggatccttattccagaattagaggaatcctattattatcaatcgtctcgagggaatatctcgaatgtgctcgtaaaagaaggagacgatgtttcaataggtacatctctttttgaatatgatgatggagaagtcgttaatgtatctgatttgaaagcacaattgaacaaggcggaaacagctgtttctgtccttgatgatcagctaagtgaccttgctgtccagtcatcgagaattgaaacaaacgaggatctagaagatgatcaaaagcttcaattgcagttagatgtcgaagaacaaataagaaatacagagtataagaaaagacttgctgagcttgatgtgaaagagttggagcgtcaaattgctgaggtggatactgaaaaagtagaattatccgttgattcaacgcttgatggaacggtggaacaagtaaatcgtacaccagaagacggggagagcgtcgtaacggttttgtcaaacaagctaactgttcaaggttctgttaatgaattggattatccaacgttagctgtggatcaggaagttgttatacgttcaggcgcttatccaggacaaccagcaacgggccgactgacaatactagaagatcgtccttatgaggtcgatgaagagacgggtctcagtatgtatcattttaacgttatattaagtgaagaaagtgaaatgaaggcaggtacgcacgtggtcattgacgtccctcttcatcaaaataacaatgctccttcagtcccaacagaaagtataattgaaaaagatgataagagctatgttgttgtgtatgaagaagatgagcttcatttaaggaaagtagagcaaggccgaatagaaaatggcaaggttgaaattctttcaggtcttcagctaaaggaaaaagtgttaactaagcctagagaagcctttacggaattgctttctgagaaggaagagctggagaaaggccaagaagaccaagatgaaaaaccagaggtggataccgaaagcaaaggatgaacggaaagacctgtagcgatacaggtcttttttgtatgacatcattaagttatcaaactattcatgaaacactacaacgttcatgtcataatggatttaagcgtttaaagaaaaggagaggttattgtcatgaattttgtttcatttaaggataagaaagcatatgggtttggaattttagatgaaaagaatcagcaaattgttcatttaaaaacgtattatcgcgatcaaggagtagacatccctgatttgcgaacgtttatccaacatgaggaacttcatttggatgattttcacgaatttccagctcagtataacgtttcagtcgaagatgtggagatcgtagctcctatcatgaaaccagccaaaaatatagtttgtgttggaaaaaattatcgggaccatgccattgaaatgggaagtgcgaaagacattccgaagcacccaatgatttttacgaaagcgcccacaaccgtgagcagcccagaccaagtattaacatttgaaagtgagctagctgaagcacttgactatgagggagagcttgcggttgtgatcggtaaggaaggaaaaggaattagcatggatgaagccatggagtatgttttcggttatacgattatcaatgatctcacagcgagggatcttcaaaaaaagcacggtcaatttttcgtaggaaaaagcctggatcagtcctgtcccatgggtcctgctattttacataaatcttccattgtcgatcctcaccaattacaaattgttacgaaagtaaatggtgatgtgagacaaaatggcaacacgtccgattttattttcaatattcctgagctgatccacgttctctcaaagggcatgacgatagagcctggtgatatcatcgcaaccggaacaccggctggggtaggcaagggattcaatcctcctaaatatttaggagatggagacgtcatcgaaatacacatagaaggaatcggcactttacgtaatgaaataagtataagataacgttcttgtgtttaatttattctcaaaaaaggaattgttatccagagaactgaactaggagggttagcaaaatggaaaaatttcattacattaatggtgagtggacaggtcaggatctcgaaaagcttgaagtgaacaacccagcaactggagaactcgttggtactgttccggtaggtggtaaatcggaaacaaagaaggcaattgacgctgcacacaaggcatttccagcatggtcaagcctcaccgcttatgagcggtcatcatacttaaagaaactccatagtcttatgatggatcatgaagatgaactagctgagctgatgacgcttgagatggggaaaccacttcatgaatcaaaaggggaagtagcgtattccgcttctttcgttgaatggttctcagaagaggggaaacgtgtatatgggcggacaattcctccacacaaagaagggcgtatgatggaagtgcgcaaacagccggtaggggttgtcggagcgataacaccatggaattttccagcggcaatgattgcgcggaaactcgcgccagctttagctgcagggtgtacgtttgtcgttaagccaccttctgcaacgccactaacggctgtaagacttgtagagctttgtgaagaagctggaataccaaagggggttgttaacctcgttacgggaaaatcttctgaaattgcagacgagctcatgagtaaccctcacgttcgtaaaatgacgtttacgggatcaactgaggttggtaagaaattgatggaacaggcggcagaaacggtgaaaaatatttcactcgagctcggtggacatgccccaattattgtccttgatgatgcggatattgataaagcggtggacggtgtgattgcgtcgaaatttcgaaatggcggtcaaacgtgtatttgcggtaatcgcgtttacgtgcaagagataatttatgaggagttcatttccaagttcgctgaaaaaacgaaagagcttaaagttggaaacggattagaaaaagggatagacattggccctatgatcgacaaagatggttacgaaaaagtggaaaagcacgtacaaaatgcgcttagtcagggtgctgaatgcgtagttggtggagaaggatatgaagaaaacggatcctatttctatcgtccgacgattttgaaggacgtaacgccgggcatgcttattatgaacgaagaaacgttcggaccggtcgcgccgattcagaaagtgaaaacggacgaggaagcgattaaatatgcgaaccaaacgccatttggcttagcggcatacgtctttagtgaaagcgttcgaagaggaaatcatgtggttaatgcgcttgattatgggattgttggctggaatgacggcgtaccgtctgctgcacaggcaccgtttggtggcatgaagcaaagtgggattggacgtgaaggcggtcatgaaggcattgaagcgtatcttgaaacaaaatacgtttcaatcggattatagaatagtagaaagcctcgctaaatttagcgaggctttcctttattgctattgtacagataaaacttcagtaatttgttcgattgcccagtttaaatcatcttcactgataataagcggaggagcaaatcgaatgacggtttcgtgcgtctctttacagagtaagcctttttcttttagcttctcgcaatatggacgagctgcttcatgaagttcaacacctatgaaaagaccgcgaccgcgcacttctttaatgacaggattgttgatggctttcaatttatcctgaaagtagttccctagttcaagagagcgatcggcaagcttttcatcttcgagaacttctaatgacgcaaccgatacagcacacgccagtggatttcctccaaatgttgatccgtgtgagccaggagtaaatacgccgagtacttcttcgtttgctgctacacacgagattggaaatacaccgccaccaagtgccttaccgagaatgtacatatcaggttcaacgttatcccaatcacatgcaaatcgcttaccagagcgacacagtccagcttgaatttcgtccgcaacgaatagaacgcgctgctctttacaataatcatacgcttctttaaggaagccttcaggcggaatgttaataccagcttcgccctgaatcggttcaaataagaagccagctgtattaggtgtgattgcttttttcaacgcatcaagatcaccatatggaatcaatttaattcctggaagcatcggaccaaatcctcgctggtactcctcttcagaagaaagggagacagctgtcattgtacgaccgtggaagtttccttcacaagcaataatttcagctttatctttctctacgcctttcacctcataagcccagcgacgcatggcttttacagccgtttcaactgcctctgcacccgtattcattggaaggatcatctctttgttcgtaaattcagaaactttttgataaaaaggagccagttgatcgttatggaaagcacgagaagttaacgtcacgcgatcagcctgatcttttaaagcctgaataatctttgggtgtctatgtccctggttaactgcggaataagcactaagcatatccatataacgatttccttcggggtcttttacccaaacaccctctgcttctgcaataacaattggcagtggatgataattgtgtgcgccgtattgctctgtcatttggataatatcttttgtttgtaccatattaccgttcactcccattcgtttaattcttgcttcctttctagtataacaatgaaatcgtttccttcctatcatttgaggaaaattaggaaggatgttccattccctgctcacaacggtttttcgtgatatgatgagagagatactgtggtaaaaggggagatcatgaatgctacatgcccattatacggcctgggggttaacacttattctttttcttgtaagctactttttcatgagggctggaaaagggaaagcgcaaaataaaatccatctagttcttcggatattttatattcttacagtcattacgggaatgttccttgttgtaggataccaattttggggtccttcaattgtaaaaggcgttgttgcgctctggctcattttttcaatggaaatgatccttgtaagaggaaaaaaagaaaaaatcatttggccattttggcttcaatttatgttcgcttttctactcgtcgttttttatgggtattctgtactgcacctttatcagctataagtcctaaaaccaccttattataggtggtttttttctattaaacgtttcatttatttgtgccgatataggaagtagggtagattggcatatttctggaatagatgtattcgtacattctagtttttgatattataaacataataaaaactttcgaattaaaggcattgaaggatgaggtgtgaaaagcttgagaacattttcagttaaggtctctcacgaagaaaacctgcgcgaatatatggtgaatcactcggaattgtttcaggcacatgccgtattcgttcaactatatagtttttcgcataacaaagagcatgcggctggtgttgcacagacgataacgacttttttacctcatgcagtgctaattggggccaccgcggaaggcgcattttatgagagtaactcggtaacagaaggcatcctggtttctttcacaacgtttgaccatgcagaagtgaagccatttgtgattgaaagctccattttgcataaaccgtttgaaggtgatccaaaagaacttgtcattttatttaatagtggaatcgatgatcaaactgttttaacaatgatgggaaaaacaccattcattggtggtaaagcttctggaatgaatcagacttccttcattgtagctggtcagcaagtcctatcaaaagggatcgtaggcgtccgcataagtggacagaacctgcatacaaaagtttatgaggaaaccttttggaaaccagcaggacgatcgttcgaggttacaaaagctcttggatcccgtatttttgaaatagatggccttacttcaatagaattctatgagaagtatttaggctatgatatggcgaaacggctacctgaatcgtccgctcatgtgcctttgcttcacttactaaatggaaaagaaaagccaatttccgttttaaagaaacatcgagatggttctgtcacggtaaacgcattccttgctaaaggatcgaagctacagttttcttacggagacgccacacaaatggctcactcttatgagcgaattcaaaaacacgctgaaatggatggcttagaaagtctcttttctttctcatctgcttcgcttccgaagctttttgcaaacggaattgttcgttattttgatagtctagaggagctttgcacacttacatctattttgcttgaatctgaatattactcagatggcactgattttcactatgaagagaacaggatggtctttgcgcattttaacgaaaaagatgtcaaacaaaaagctgtaaggcatctaccattacacaatcaggagatgaatgacttggatggtttaatggcactatcacatttaattaaagcttccacagaagagttagagacgttaaacaccaatcttcagcagtcagagcagcgctttaaatctctgtttgaacaaaacccgaatcttgtttactctgttgatgtatacggtaaaattacgagtgtaaatccggcactcaaatcgctacttggatatacttccgaagaagtgatgagtaagcattcccttcagtttgtctcttctgaagatgtccaaatgacaagagagaaattttatcaaacgttccaggggatggctcaaacgtatgacgctcatcttgttcataaatccggagtcagcgtgttatttaccattacaaatatcccgattattgtaaatggagaaattacaggtgcgtatggggttgctaaaagcattatgaatcagcgaaaggctgaagaaaaaattgctcatcttgcgtattatgatgttcttacagagctacctaatcgcctgttgtttgagaaattattaaatgaatcattaaagaatgaagaagaaaaactggctgtgatgtttatcgaccttgatcggtttaagttaatcaatgatagccttggtcatcagcgtggagaccaaattctaaaacaagtaacctcacgtataaaggaagccattaaagatgacgccgttcttgcaaggtttggtggggacgaatttaccgttctccttcccggacttccgtgtgaaaaagatgcgttaatgctcgcaaagcgcgttgttgatcatctaaaacagccaattctctttgatgatgtggagtactttatgacagtaggcattggaattagtctgtttccacttgatggacaggatttggatacgctcatgaaaaatgcttatatcgcattggatcgagccaaacaacagggtgccaactatattgagttttatacagatgaaatgacagatgaggcttttgagcgtttagaacttgaaagttatttaagaagagcgcttgagaaagaagagcttacgttattttaccaacctcaagtgaatcttgatgagaagaaaatttatgcttgtgaagccttgattcgctggaatcatccgaagctaggtctcgtttcgccagctcaatttataccgctcgcagaagaaacaggcttgattgaagaaattggcatttgggtgttaaatgaagcgtgcatgcaaacgagcaggtggcaggcgcttggatacgacgatttatccattagtgttaacgtgtctggtcgacagttccagagtgagcgattcgttgaatccgttagagaagctttaagagcttcaggactctcgcctcattcgttacatctagaagtaacagagagcacaacgcttgtgaataccgattacagtatttcaatgttgaacgaattacgaggaatgggcattaaagtatcgattgatgattttggtactggttactcttctcttagttacttaaaggattttccacttgatatcctaaaaatagatcaatcctttattcgaaaccttcaagaaaataacgcagatgcagcgattgtaaaagctgttatcacaatgtgcgaagggttgaatttatcaatcgtggcagaaggaattgaaacgaaagagcagggagacattatacgaagttttggctgtaattttgctcaaggatttttctatagtaaacctttgaataaggaccgttttgaaaagcttcttttatcaaaacgctttccgctagcaacgtaagaaagatcgacccattgtggtcggtctttttttgagttaaccaactggaaatattggtgtaggatgctccacattcaaacagtcgttatattcgccgccagaggctattctcgaatgtgcttcgactgtttcaagcatcaattggaagggaatagaaaaaatagcgaagaagaggtgatggtacatggattatgatgtgatgatcattgggggaggcatatcaggacttacactcgctgttaaattaggacagtgtaatgtgaaaacgctattaattgaaaaagataaaaagagtgggttgatttataaaggagaactgcttcagccaaagagccttgaagttcttgatcggattaatgtgctagaagttgtgaaagagaacgggtttctgttaccttcgattgaattttacgagtataaccaaacagatgatggatcaatggaacagctgagtgttaatgagttccgttacgatgtaatcccatctccatacaacacgtcacttatgattccgcatgagcggctaaaagagcttttgtttgaagaagcttcgaaatatgattcggttgattatatacagcctgcgaaattaacgggttttactgaagaagagcctgagaacaggaaagccattattcaaacgaaagaaggagagcgtgaaattcatgcaaacttttatattggcgccgagggaagggcatctccgacaagaacggcaatggaagttgagatgaagaatacgaaatacaatcatcatttcttaacagtttcgtttccgagaccagaaacgctcgatcagtcaacgatcattacgactcaaaataaatttgttggccttttcccgcttccaaacaatgaagtgagaagcgttctcttaattaaaccaggtgaatttaagacgatgcgagaagagggactggaatcgttttaccgtgcttattgtgaactgatgcctgaacttaaaggctatgtgcatcagattgatacgtggaaaaaaattcagctcatgattccggttagacacaatgtttcaaattacgtgaagaacaattttattttaactggagatgcagctcatagcgttcaccctatggcaggcgaaggtatgaacctggcaattcaggattcagatgtgttaggagaacttctctgctggatgtttcaaacaaatcaaacggattggaagcatctaaagtggtatgaaaaagtaagaaagccgcgagcagaatatgtttcaacattaagccaccaggctgcattgctttactcatttccttatcggccgtggcagaagcttcgtataaaaggagtgaagcaaacggagcattccccgctccttcattttaaacagatgctgaatacgtcagggctgggaatatggaaatttaccttgttggatcgtatgaaacaagcaggattcattccagcttcgatagggaacgggaaattaagtaaataccataaaaggaaaaggatgtttacgaaggaagatgactatccgtggtatcgcaaatgagacgggaggaagtaaaatgaaagaaataaaaaagatctggcgtgctcgaaagtggatgaaaagtaatgagccctttttatatgcctggcacgctcacgtaggatatgtacacgatttatttgatgaattcgaatccagcacaaccgtctcaagcgttgcgaccaaacgagacatgaatgaactgcttctaacaagatgggccgatgttggtgtggcaatcggtcatttaacaaatgaagagaatggaaaaattcgttcaaagaaacatatggtggagtcaatatccaaaaacagtgagcagtctgttggcattttattaaaagaaatgatggaattacatattccgattttgctttcttatccggatttactaaacaaagatcaacatgccctctatcaggatgaagactatggtggaactgttgcagcgacatcaagctttattgaacggtttgcctttccaaagatttatcaagccattaaatcaacaaatgcaacttctgtcattgattttggtgcaggatatgcaggttatttatcgcgtattggggcgaagcttgaaaatatgaaacttgttggaattgagaaaaatcgatcggtttgtttggatgcagaggaccacatccattttccgttaaaatcaccgattaacctctaccctgatgatatgatgacgtggaaatgggacggagagccatttgatgtagccatgatgaataatttactctactattttgctcctgaggatcgagtgaagctttttgagaaagcctatgaagtaactgaggaaaatggtcagcttctcattatcaccccaatgcatgaatccaagcatggccttgccttttcagcagcgtttaatagcttcatgagtgcacacgataatctgtttccgctgccgagtcgagaggaaatggaggagcttgccgctgaaactggatttcaattaaagcaggtaaaacctgttgtcaaagaaggcgcatggtacttcttgcgttttcaaaaagtgtgaggccttttaaaaggtctctttttttcgttgtaactgagacattttgcacgaaacttaggcgtatgcataatgtgaaaagagagcaacgaggggaggaagatctttttgtgtgggataacgggatgggtggattggaagaaaaatctaacaggcgaagagaaagtcctccaggatatggcgcaaactttatcaaaaagaggacctgatgcatcaaacgattgggttgatgggcattgtggatttggtcatacgcgattagtcgttgtcgatccggctggtggaagtcagcctatgacaagaaaacatggtggtatcaactatacaatttgttataacggtgagttatacaatacagaggatttacgcaaagttctcctcggtaagggatatactttccaatctcattcagatacggaagttcttttaacgtgctatgtcgagtggggagagcagtgcgtggatcatttgaatggcatatttgcctttggaatttgggatggggaacgtctctttcttgcaagagatcgacttggggttaaaccgttattttatcgacaaagtggaagttcgcttcaattcggatctgaacttaaagcgatacttgctcatccagacgtcaagaaagagatcgaccgaggtggtttacaagaaatctttggcctaggtccatctcgtacgccagggcacggtgtttttcgtggaatcagtgagctccggccgggatttgctatgaagtttgaacgaagcgggctacggatttggcgttattggaacgtcgtaagtaacgagcatacggatgaccttgatactacggtggaaaaggttggcgatcttttaaaagattcgattaaaaggcagcttgtagcggatgttcccgtatgtacgtttttatccggtggggttgattctagtgcgatcacttctgttgctcgaagtgcatttcaggatgatgggaaaggtacgcttcgctccttttccgtagactatgttgataatgataaatactttaagagtagtgaatttcagcctaattcagatgcgccttggattaaaaaggtttccgcggagctagcaacagatcatacgaactgtgtaattgacacagctcagcttgttcatcatttaaaagaagcgattgaatgtcgtgatcttccgggcatggctgacgtcgattcatccttgctatggttctcaaaagaaatcaaaaaacacgctactgttgcgttatctggtgaatgtgcggatgagatctttggtggttatccttggtttcataaaccggaactattagatcaggaacagtttccatggatgcggtctactcttgaaagacaggcgatgttaaaagaagacgttcggaataagttgaaattagaagactacgtgattgaaaggtaccgcgagtcgattaaagaaaccccggctcttgatggcgaaagtgaaatcgaagcaaaaagaagagcactcttttatttaaacttaaattggtttatgacaacgttacttgaacgcaaagatcgtatgagcatgggggctagtttagaagttagggtgccgttttccgaccaccgtatcattgaatacgtttggaacgtaccgtgggagatgaaaatgcttgatggacgagaaaaagggctattgcgtaaagcgatgactggaacgctctcgcatgatgttctttaccgtaaaaaaagcccttatcctaaaacgtataacccagcttatacgaaagccgtttcctcatggcttcaagatacgctcaacaataagcaagcgccactcctcgaattaatcgatcaaaaagttgttcaagaaattatcgattcagaggggaaagcatttaaagtgccttggttcggtcagctaatggcagggccacaattaattgcccaccttgctcaaatcaattactggatggaacatcataacgtgaatttagtagattaagaaaaggatcggagcctgggggctccggtccttttctattggtgtttatagtgtagggctccagcgcttgtcgaggctaaacggaggcttccgcttttcgttgatccagctgcagcctccagaccctcggtcacttcaccttttcatccgaacacaaatggcgtgttcaaatgaaaagcctccagtgtctgccgtgtctaaacggaggctttcgcttttcgtgagatccagctgcgactcgcagaaactgcgatatttcactctttcaccagaacacaaagggcgtgttctagttcaagagttccaatatctccgtttctaaacgctcgtcttcgcctttcgctgatccagctgcagtgggcagacactcggtcacttcaccttttcatccgaacacaaagaccgtgttcatatgaaaaggctccagtgcctgccgtgtctaaacgcccacttccgcctttcgtgtctagctgcagcgcccagcctctcgatcgcttcacctcataaaatgaacacaaagaccgtgttctttttatgaggctccagcgcttgtcgaggctaaacgggcgcttccgcttttcgttgatccagctgcagtgggcagacactctgtcacttcaccctataactcgaacacaaagaccgtgttcaatttatagggctccagtgcctgccgtgtctaaacgcccgcttccgcctttcgtgtctagctgcagcgcccagcctctcgatcgcttcacctcataaaatgaacacaaagaccgtgttctttttatgaggctccagcgcttgtcgaggctaaacgggcgcttccgctttttgttttacccgctggtttttgcttcggcttgtggttctttaacacctggttcgagtccgttgagtcgctcgactaggccgtggccgaatggagaaggggatgaagggctttcgttgttgtttagaatgccgcctctaagctcgtatgctgtggagccgtgctcggcgaaatcaagtccttgaatttcttcttcacgagaaacgcggattgatgtgaaacgtgtatagatgaataaaaaggtgccaaccgttcccattgtccaggccataacagctagaattccgattgcttgaacaaggataagggatgcgccgcctccgtaaaataatcctccatcgatagcaaataatccgactgctaaagttccccataccccgcatacaccgtgaactgcaattgctccaacgggatcatccaattttacgcgacggtcgatcagctgaacggcttcaattagaataactccagaaatgagaccgataaacatggcgccaattggggatacgcttgctgtacctgctgtaattccgactaatccagctaatgctccgttaagtgttaaggaagcatcaatttgcttatagcgaacgtaagaataaagggcacttccaatgacaccacttgaagctgagagaagagtggttgctacgatagtaggaataagtgcgtcgcttgctgaaagagtactacctgcattaaaaccaaaccaaccgaaccagagaatgaatactccaagagcaccgagtggaatattatggccttgaataacatttaccttgccgttcgaatatttcccaatacgtcctccgagaaacgcaacggcaactactgctccaagtgcaccagtcatgtgaacgaccgttgatcctgcaaagtccgtgaatcctaactctgcaagccatccgccaccccagatccagtggccaacgacagggtagacaaatccaatcataattactgtaacagcgatgtagctaatcagtttcattcgttcagctactgccccagaaatgatcgttgcacaagttgctgcaaagacggcttggaatacaaagaatccaagattttcagattgtccaaagagaaagaagccatcactaccaataaatccgcctgctgacgaaccaaacattaatccatagccaacaatgaagtaaagaactgcaccgatcgacatcgttagtaagtttttcattaaaatgtttaatgcgtttttcgagcgagtaaacccagtttcaaccattgcgaatcctgcgtgcataaagaatacgagaaatgcagcaatcataatccaaaccgtatccattgaagcactcaaggcacttacttctgtagcatcacctgcagcgaagacatgcccacctgaaagaaggaagagaagagcgaacaaaccagtgatctttttcattgtttttatcatccttttctttttatttaaatgcagttagtccatgttcaccagatcgtatgcgaatgacatcctcgaccggatagacgaatattttaccgtccccaacttctcctgttgcacatatatctcgaatattcttaatcacatgatcaagtagatggtcgtcgaaaatgagctctactttaatttttgcttgaagtgagacttcgaagtggcttcctctaaacacgcctgtttgctttttttgtaatccgcatccggctacctcggaaacggtcatgcctgtgattccttcatctcgcaatcgatctctcagatcctggaatgcttcagggcgaataatggcttctacttttttcatgtaagaccctccatgtcagtttttctaacattgctttttttctatatcctcatgttatgctcagaaaacgtgaaattcaagtttatttttagaaaatttaaaatactttgttagaaaatctaactatctctaaaatgaattatcagaatattcaaggcgtggtaagggtggttacgcttacagagtaggtagaggatttgatacgaaaaaatctcccggattctatatccgagagatttgtccttaacttaaaagcaaaattgcatagccaaatgatttgagatgaagtggagagccgtgctcatagtgactgcccaatagacttttaggttcttctttcagagatgatagatcaacatctacttcattggatgaattgtttaatagaaagagaagtgtttcatcatttccctgcttcttgtattgaattagcgtttcatttgaatcaatgattttaaaatatcctccattgccaaatgcggaatgatgttttctaagagaaagaatttcttttaaaaattcaaaaaggtcggtgtcctgttcgttctcgtcccagatcatacattcgcgacatccaggatctgcgccacctttcattccaatttcgtcaccataatagatgcatggcgtacctggaaaggagaattgaaggatgtacatgagtttgacaacttcttttttttctttcgctaacgttaaaagtcttggtgtatcatgacttcctaataaattaaacgcaacctcattgacgttagcggggtaagaatgaagcagtgaagaaagacggtctcccatcgtttcggcagtgatcgtgttatcggcgtaatggtcaagaagggcagacgttagcggatagttcatcacagcatcaaactgatccccttgtagccacggcatcgaatcgtgccaaatctccccaagaatatatagctcgggtttaatcttttttacttcttccctaaattctcgccagaagcgatgatcaatctcatttgcaacatctaagcgccaaccgtcaatatcaaactcttcgatccaatagcgaccaacttgaagcaagtattcttttacttctgggttttctgtgtttaatttaggcatctttgcttcgaaagcaaatgtatcataggaaggcagaggctttgtttcaattggataagatcggacgtgaaaccagtctttataacgtgattgttcaccgttttttagtaaatcttgaaacggttcgaagtaatagccgctatgattgaaaacagcgtcaagcatcactttgattccccgttcatgacaggcatctacgagtttcttaaacgtttttttatctccaaattgaggatcgatctccatataatcaatcgtatcgtatttatggtttgattcagctttaaaaataggggtgaagtaaattccgtttactccaagctcgatcaaatggtcaaggtgatccaaaactccctgaaagtcgccaccaaaaaagttattttgctgaggaggatattcgccccatggaagtgttcctttagggtttagcgaagtatcaccgtttgcaaatcgctcaggaaagatctgataccacaccgtatccttcacccaggaaggcgcagtgaaaacatcagcacgatttagaaaaggaaaactaaaataatcatttgtgtcttcaggttgtttttcatagaagcctttttctgtatagaaataagattcatccttaccttcaagatagaatccgtatcgtaaacggcgatatggcggttggatcgaaatagtccaatagtcgaaaagtgaatctgaaccgcttacctggaggggatgagaggtgaattgccatttgttagcttcccagtcgtaaggatcaccataaatgagagagactgaagtaagatcgtcttttttcgttcgaatcataagatgtacagtttcgttatcataggcataagcatagttgttctttggacgatgatagatggcttctttgaacataaaagatatacctcctcgtgcaatcgcttgcatgtagttttaaaaaatcaccctagctttttctaatagaagaaaaggcatgtagcgtttcttctctatcaaatgtagaagatcaatcgcttctagtcaaatgtaaaaaacaaggaggatttggtatttcgaaaaaattttgaaaaaactttgtgcaaacggttgcgaaaaattaatgggcatgtataataggttatagaaagtcagtgcaatcgttttcactaaagcatatgaaagcgcttgtatgatgatcgaaaatttaagagggggttaacacatgaaacgctttttcgctttgtttcttactctagttcttgcaatcggcgttcttgcagcatgcggaccgcaaaacaatgaaaacgcttcaagtaacgggggaggcagtgattctgaaggggatgacgctaacaaacctgagaagctcgttgtttgggaagatacagataaagggattgcgctcgaaccggcaattgctagtttcgaagaagagtatggcattaaagttgaatttaaagaactaggtatggcggatgaaattagagaacaaattcgtcttgacggcccagcaggtactggacctgacgttattacactaccacacgatcaaattggacaagctgcggttgagggacttatttctccaatcgaagttgagcagtccgttgttgatacgtttacagaatcttctattcaagcagaaagctttgatggaaagctatacggactaccaaaagcaacagaaacacctgtttttatttacaacaaagaacttatggataaagcaccagaatccatggatgaagtctatgatttcgcaaaggattttacaaaagacaagcagtatggcttcttagcactttgggataatttctattttgcaaacgctgtattagctggttatggaggctatgtctttgatcgcacagatgatggcctgaatccggatgatatcggtctgaacaatgaaggtgcagtagaaggtactgagtacattcagaaatggtacgaagaagggctattccctaaaggtcttattggtgaaaacggtggatcaacgatggacggtctctttaatgaaggaaaagccgcttccgttatgaacggaccatggtcattccagggctataaagatgctggtattgatattggtgttgcaccaatgcctaaacttccaaacggcgaaaactttaaaacatttatcggtgttaaaggatggcacgtaagtaacttctctgagaacaaagaatgggctacgaagcttgttgaatggttaacgaacgaggaaaatgcgaagattcgttatgaagaaacagctgaaatccctccagttaaatcacttatcgaagacccagttattgctgagaatgaaggtgcaagtgcagtagcagttcaatctcaatatggtgttccaatgcctaacattccagaaatggcagaagtatgggagccagcggcatctgcacttcagctagttgctacgaataagcaagagccgaaagctgcattagatgaagcaacgaaaacaattaagtctcaaattgaacaaaatcacagcaactaatgatttgaaaattcaaagcggtactccggaaacggggtactgcttctcactttaatgctacaaaagtgaggagaagaaaggggattgccatcacgatggaggcaactgaacgtcaaacgaagcatcgcaaaacagcactagcactttcaatcattcctggattcggtcagttttataacaagcaaatcctcaaaggactaatgtttttcatcctaacagtctcatttgcagttgcttttgctgacttaatcaacattggactatgggggatcgttacgttaggagaaaagctaccgcgagatcattccatcttcttgttaacacagggaattatcgctgtccttgttatcctaatcggattggttatttacttcttaaacctgagggatgcatacttgaacggaagaaatcgtgatcttggcattcctctaaattcagtaagagagcaatatcgtaatgttgcagatcaaggttttccttatttaatgttaacaccaggatttttcttgttaatctttgttgttattttcccgatattgtttgtgattttgctttcatttacaaactacgatctttatcattctccaccagctaatttagttgactggatcgggattcaaaactatattgatatatttaaattggatatttggcgcgatacatttttggatgtattttcgtggacgatcgtttggacattcgtagcaacgaccggacaaatcgcgattggcatttttctcgctgttttaatgaatcagaaagaccttaaatttaaaggcattttcagaacaatctttatcttgccatgggccgtaccagcattcgtatctattcttgtatttgcagggatgtttaatgaaacgtttggtgcgataaacaatgacattttagcagcgttcgggatcgatgcaataccatggcttacagagccattctggacgaaaattgctttaattttgatacagttctggcttgggttcccgtttatttttgcaatggtgacaggtgtactccaatcgattccagatgagttatatgaagctgcgacggttgacggagcgaatatgtggcagaagttcagagggattacacttccaatggtactgtttgccatcgcaccaatcttaatcacgcaatacacatttaactttaataactttaatgttatttacctgtttaacggagggggacctgcagtttcaggtcaaacagctggttccactgacattttgatttcgtggatttacaagctaacatttacttccgcacaatatggaaaagctgccgcaattacaatgatactatcagcgatcgttatcggtgttgcactgtggcagtttagaagaacgaaatcattccaagaagaggatatgatgtaatatgagtccaaaaatgcagaataccgtacgcttaaccttgtcctatattgctattgcgattgcatgcgtcatcattttatatccagttctctggatcgttggatcatcgtttaatcctggagacagcttatctggatcatcgattattccaaaagatgcaacgctcgatcactacaaatcgttgtttaatacagaagaaagtgactacctactctggtactggaacacgcttaagatttgtatcatcactatgattctagctgtagccatgatttcttgtatggcctatgctttctcacgttatcgctttgttggtcgtaaaaatggcttgatgactttcttaatccttcaaatgattccaaactttgcggcactcatcgcgatttacgttctggcttatattacaggattattggatacacactttgcattaatccttgtttatgcaggtgggctacttccgatgaatacgtggttagcgaaaggttattttgatacaattcctaaagaacttgacgagtccgcacgtattgatggagcagggcactttcggatcttctggcaaatcattttgccacttgcgaaaccgattcttgctgtagtagcgcttttcagcttcattacgccgttcacggactttatccttgctcaagttatccttagaagtgaagagaaatttacgcttgctgttggtctttacaaaatgatttctgatcaattcgggaatgagtttacaacatttgctgcaggatctgttttgatcgccattccaatttccatcctattcctatcgcttcaacgctactttatttctggcctaactgctggaggaacaaaaggatagatctcagactggagaaagaagatgaagaggaaagcttctcttattccttctttctcttttttatcttacttacgtgtgaaaaaactacctcataaataccaatcgagacgtttaagtgggagcaattgatcttaaaggttcgattcgttagagatgtttttttagtaagaaatcgtttacaataagtgattaggttattattaatgaaatcgtgctaggcgctaaggcgctagtagctttgtataggaggaattccaatggctgtaacgataaaagatgtagcaaaacttgcgaatgtcgcaccttctacagtatcgcgcgttatcgcaaacaatccccgaattagtgaacaaactaaacgccgtgtaagagaagcgatggaagagcttggctatcatcctaactataatgcaagaagtctagccaatcagagtacccaaacaattggtctagtgatgccaagttctgccgataaagcattacaaaatccgttctttcccgaagttcttcgtggaattagcacgaaggctcacgaaaaagaatacacgctttatctttcaacaggcgctactgaagaagaaatgcttcaaggggttatggggatggttcacggtcgaagagtggatggaatcgtcatgctgtactcaagaatcgatgataaaatcatggcatttcttgagcaacagaactttccatttacagtgattggcaagccgctagtaaatcctgattcaattactcacgtggataatgataattttcgagccgcgaaagatgtgaccgatcactttataggaaaaggtcacaagcggattgcatttgtcggagggaatttagatcttgttgtaacagtggatcgactaagcgggtatgaaaaggcactacgagaagctgatattccttacagcgatgattatgtagtacacgtagagtttcttaaagagggtggacatgaagctgtaatggagctgttttctttagaaaaaccaccaaccgcgctcgttgtagccgacgatctaatggccttaggaataatgagcaaattagatgaaatgggattatcagtgcctcaagatgtttccattattagctttaacaatgttatgcttgcagaatatgctagccccccattaacgtccgtggatattaatatctttcaactaggatatcaggccgttaattgcttacttgaaaaaatcgatgacagtgagatgacgagtaaacgagtctgcataccgcatcatgtagttgatcgttggtcagtcagaacgcttaacgaaagcgaaaaagtaaactaaccgtcttatagatggttagttttttttgtgagtagccagtctaatatttctttaaagggttgctgatctcttgccttttcataatcgtggaatggcgtcaatttacgctttaacacgcgttccattgaaaaatcagtaggcgttaattcgtcttttaattcattccattcaattggtgcggcaactaacccttcggcatttccacgaggggaatacggtgcaatgattgttttacctgaagcatgttggacatagtcaatataaagtcgctcatttcggttctttttaagacgctcaattgtgaataagttagggttcgtttcaactaagaattttgccataaatgcagtaaatacttttgtttgttcataagtgaaggtatcgaatggaagcgggatgtgaatttgaagacctttgtttcctgataatttcaaaaaacctgttaaatgaaggcgatcaaggttgtcctttatttgttctgcggcgagcaccgctagatgaaacgcctcattagaaggaggatcaaggtcaaaaacaatttcggagggcttttcggattgataggaagagaaaggaatatgaaattcaattgcagcttggttaccaagccatagtaaggaaggtagatctgagcaaataatgtaattgttatcatggtgctcaactgttttaataaagtctggagcgtattcaggacagtttctctgataaaaggcttctccaataataccatcaggataccgaatgaccgttaacggtttgttatgtaaaaatggaagcataaggggagagattttagctaaataattcaaatagtcagctttggtaatgcctttccacagaagcttctccgcattcgtaatcgtaacctctacatctcccactgtgattgaatgttgtcccatgtacattcctcccatgatcgatcaaaacaaaactgatgaaacctcgggtgtctcaacttttccttatatagatcgaggtatttaagctgaattactatgccgggatctacataagttaaaccagctttttcgtatactttattaagtttcatcacctcaaataaagctgttctttcttctgaacggagcccgtgtgtaaaattcgccacttgataaatatcacccgatcgcttaacagctacatgaaaatacccgttcgtttgatcatatgcatgcaaaaaaacgaaagcaattttccaatttttcaccttcaaccagtttttcgttcgttttccaggggaatagatactatcagcttttttgcaaaccattccttcaccgttgtgagatgtaatcaaattccataagggatcggcatcattgtatgaatcaacataataaatactgttgttcggagggaatttcttcatcaccttttgaagatatgtctttctattgtttagtggagttgataataagacatcatctaaaaattctataagatcaaacgccataaacgaaagattatcttcttgaccggtatgaagggcttcaaaatttgcgaagtatctattttttaacacacacacttcaccatccaaaacgcataatggaatattgttctctttaaacaaattgataagcgactgatgtaagaattgaaatttcttattgaaattgtgaccatttcgacttgttaatgttattgtatttccatcccagtataagaaagttcgatagccatcatatttcacctcatacaaccagttcgctgtatgaggaattgaggcggtaagtgtagggagcataggaagataagttgatgtcatttagcgaccttctttttccttggtgcagcttttttcttttttggaggcgccttaggacttgtatctaagcttgcttgtagggcatccatcagatcggcaacatttcttttcggtttttcttccacaacttttatttcattaccagaaatcttactttcaataagggcaagtatcgcttcacgtcgctcatctttgtactgagaaggatcaaatttggtcgtcagttgttcgattaactgttttgccaacttcttttctttatcgcttacgtcaagttcttcaggaatatctggaacattaccgatctcccttacttcatcagggaagtacatcgtttcaagcatcaatcctttgtcatatactcgtactgctgcaagatgctccttagagcgaatcgttattttagcgagtccaattctccccgactcttccatcgcttgctttaacagcatatacggtttacttccatgatcatttggaccgataaaataggatcgattgaaatagattggatcaatgtcatttaattcaacgaaatccacaatttccactgatttgtttttttcgtgcgccagtgattcaatttcatccttttccatgatgacaaactttccatcttcgtattcataacctctcacaatatcttctgattctaacggccgatcacaattagggcatcgtttctcatactggatcggagtatggcattccttatgaaggtagcgcatcttaatatccttatcctctgtcgcagcataaagcttaacaggtatattaaccaatccaaagctaatagcccccttccacatcgtatgcaacacactcaccctttccaattcttttcacttagtttctcacaagaatcaaaaatcataatagaaaaaaatggtggagggaaatgcagcagggtagcaaaaaaacctccagtggaggttttattaagaggtaacgaactgtccgccattaatgtggatcgtttgtccagtcatataggaagaatcatccgaaccaagaaggacgtaagccgcagctaattcttcaggttgaccaggtcgccccattggcgtatttgttccaaagtttttaaccttatcagcagaaaacgttgaaggaattagcggtgtccagattggtccaggagcaacgctgttcactcttatccctttgccaacgagtgatttcgcgagacttctcgtgaatgttgtaatcgcgccttttgtacttgaatagtcaatgagctgttcatttccctcataagccgtaacggaagaggtgttaataatcgcactgcctttcttaaggtgaggaagcgctgctttcgttaagtaaaacatcgaaaagacgttagttcgaaatgtcttttcaagttgctcggctgtaatttcttcaatgctctgcttaggatgctgttcagctgcattgttgattaaaatatccaattgtccgaagtgatcaatcacctgcttgatcacactcgtcgcaaaacgttcatctccaatatccccaggtaataacaagcactgagtaccttcatcttcgatttgcttcttcgtattctgtgcatcttcatgttcgtccaagtagacgacggctacatgagcaccttccttcgcataagcgattgcagctgcttcgccaatgccgctatctcctccagtaatgagggcaactttacctgttaatttaccagaacccctgtagtcatgatcctctgtaagggggagtggattcatttctttttcagatcctggttggtggttttgatgctgggcaggttgtccttctgtttgtctaaaatctggtcgcatgttagcactccttttactttgtctttatgtaagagtttaccaataaaaatgttttctaaacctaatgtaggagaagtaatgatgacctttccattacatgataaaataaagcatacttaaatgtagtttgtgaggcgaaaggcatgaatgttgatctaaaagaatcggaatttaaagaacagcttgcttcgtttttagaagagagtcagccccaaattgttgaaaaatggttggcgggcgcaaaaatttctcccgatgatccttactatgaagaaattataaaaaatggaaagcgcacggttgaactgatttctcgctatattcgagtgcaggatgaaaattggatcatcacgctaacgaaaaaaattgctaatgaacgaattgaggcaaatgtcaatataggcgaatttattgcgaatattaacttcggtcgatccgttgtgctctcggttttacacgagtcctcgtttaacagaaacgaattgtcgcaaggactgcaaatcataaataattactttaacgcttattcttatcattcggttacggaatatacgaagttgaaagatagtattatccaggataaaaataaattcattcaagaaatgcacagtgaccggttaaccattcttggccaacttggggcaagctttgcccatgagtttcgtaatcccttaacttcaattaaagggtttttgaaactaattgaagatgagtgtgaaacgaatcacccttcaggaaagcattattttgaaatccttaacagtgaaatgaagagtctggaagaaaaggtaagtcaatttctctttttatcgaaaatgcgcggaatcgatgatcgcccactgtctttaaatttaagtggtttattaagatacacaatcgatattctttatccacgtcttcttgaatcgaatatagaagtcgagaccgacattgcatccgacattccattattcggagttgaagagcaaataaaacaggtgattcttaatatcatgatcaattccattgaagagttaaatgaaaacatcatcgagaatcgaaagatacaggtaaaggcaaaagaaaaccacggacgaatcactgtagaaatttcgaataatggacgtcaaatatcatcgcatctcgttgaaagcatctttcaaccgtttataagcacgaagaagctaggaacaggacttggtctctcggtttgcaaacaaattatcgaaaagcatgagggtctgatatccgttacgtccaatcctgaacaaacaactttcgtcatcgagcttccagtgatggttgacaaaggtgttaaagaagagtagtttaatagtatcaaaccattacatgtaaagcttttatatatccactaggggagtcatttaaatgactgagacaggtgttcctggaccctttgaacctgatctggttagcgccagcggaggaaagtggagacggatgccaccgcagccgctccatttctggagcggctttttgacgtagaaaaaacgttgaaagcgaattgtttcagaaatgacggatcaacggtattcaagctcctttcctcttcatcaggcggatgaaaagcggagaggagtttttttatggcatttacaaaacagttaagaaaagaagctgcaccgatttttgaggcgattttcaaacatccatttgtgagaggcatcgctgaaggaaagttagagaaggaacaattagtacactacgtaaagcaggattttgagtatttgaatacgtttgtaagaatctatggcatagcgttatcaaagtgtgaaaatcgtgaagaaatggcacttttcaatgagcaaatatcatttgtccttcatagcgaaattcatccacataacaatttatgtcgcgccgctggcgtttcttatgaagagctacaaggctatccactagcgccgactgcacaccattatacgagacatatgcttgatgccgcacattccggaacgctaggtgaaattattgcagcgctcttgccatgtccctggacttaccttgagatcggtcagcgattaatggaagaggtaaaccctaaagaagatcaccctttttatgattggatcacgttttacggagagaaatcaatggaacctgttaccgatcaacttagagggatacttgatgattgggctgaaacggcaccagaacgagagttaaaacgaatcaaagactatttcattcttagctgtcagttggaatatggtttttgggaaatggcatatcaagtggaagagtggccagtagcgattcagaaaggtgagcgcgtatgaaacgattaaaactttcagatattttaataacgattgtgattgccctggtgtttgggattatttataaactgtgggggccggtttacaccattttcaaaccttttggactacatgttggggacgtcatttacggtatgtggtttattgcgggaacagtcgcgattcttcttttacgtaagccaggagtcgccttattagcggaaacagctgctgcatctggggagtttctcgttggatcagaatacggtttatctgttcttctatatgggatcgtacaaggactaggaacggaattaatgtttgctttatttggttacaagcgatacacagcttttgttgcagcacttggaggaattgctgcagcggtaggctcgctagtcatggatgctgcctatggctatgtgatggatctcgcgctttggaatttactgcttcttatcggtgcccgtttgttaggtggctttttgatagccggaattcttgcttatttcctagttgaggctttagagaaaactggcgtaacaacgttaattagacctgcaagcgatgaggattacaaagcgttggatcaataaggagtggtaacatgaaagttggcgtatcaaatcttcgtgtaaaatacgcaggagcaaaaacgttattgtttaacaacttgtcacttcaagttaaagaaggagagaaagtcttattccttggccctagtggttgtgggaaatcgacactgctacaaattttatctggactaatcccaaatgccgttccggttccgatgaaagcgggtcaagttaaaattcctgagtcctcgggcttcgtctttcaagaccctgattctcaattttgcatgccttatgtagatgaagaaatggctttcgttctagaaaatcgagcagtaccccaacctgatatggaaggattcattcatcactatcttaataaagtgggtcttcactttggcgatccgcatgttgaaataagttctctttctcaagggatgaaacagcgtctcgccatcgcttccatgcttgctcttgaaccagatgttatctttttagatgaaccaacagcattgctcgatcctgaaggaacaactgaagtttggaatacgattaagcaaatcaatgcaaaacaaacgatgatcattgtggaacataaaattgatgaagtaattcactttgttgatcgaattgtgctatttgattcagaaggaaagatgattgctgatgccgatcctaaaagtgtgttttcattttataaacctaaactgaaggaatacggcatctggtacccgggcgtctgggatgaacataagaaagataagaatcttccagcaccttatataaaaggacagcagctgatggccatccatcagttgaaaggctatcgagggaaaacaccaaaaattgaagtgtcagatgcgacagctcaagaaggcgaatggattgtcgttacaggaaaaaatggagctgggaaaagttcatttctgttaagtttaatgaatgtaatgaaaacaacaggtacgaaaagcgtaagagggcaactattaaaaacaatcaaggcatcgcgagaacagcttgcttttgtttttcaaaatccagaatttcagtttgttacgaattccgtttatgatgagcttgcttattcacttgaaatgatggacgacaggaacgtagcagaaaaagtgaagaactggctcgaggcttatgagttacatcacgttcaaaaccttcatccttatcagctttctacgggtcaaaagagacggctaagcgtggggacagcattgtttggggatcaacctgttttgttgttagatgaaccaacatttggacaggatgcaagcaatacatttaagcttctagctttatttgaacaattaaggtctaagggcatgctaattatgatggttacgcacgatgagatgattgtgcaaaactatgctacgagagagtgggttatacaagagggaaagctgattgaagatagagagttagaacgtagtgaagaggggggacgtcatgcagtggactctacaatatgaagaaacctggcttcatcgcttaaacccagcctttaaattggttttctttctttcgctatttctcattctcttgtttgttcataatccgaatgtgattagcaatttaacctttgtaccgttcattctggttttgtttgcaacaggacatcgaaggaaagtaatagctctattgcttatcccgtttttattattgtttttctcaagtgcatcgagcatgatgttttttggacagggatccacgacttggtggaggtgggggattattcacattacagaggaaagtttttttcgaggtcttcacatcggatttcgagcgctgaatttcgctcttttaggactgctatttgcgcttacgacgcgaccagtctttctgttctattctctcattcaacagcttaaagtgccgccaaggtttgcctatagttttatggcagctgtgcgaattcttcccgttatggtggaggagtttcaacagcttagggccgctttattaattcgaggagtgaaaaagaaaaaaggattgcagcgtgtcacgcaatcaattatgctctacgctgttccgcttctctcacaaagcattcgtagagctcatcgtattgctgttgcgatggaagcgaagcagtttgataataaggagagaacgtattattacaaccaaactttttcgaaagtagacatttattttgttctctatatcatagcgggcttttgtctagcttattggatcggtcatacgtttccatactttgagataacggatgttcgtaattaagaaaccggctagtttaactagccggttttttcctgtttagaggcttataaatgatcggtgtcttttgaatattgatgcttaccgccttcacggttttcttcttttaacctgttttttaacattcgttttgcgtttttatcaacaggttttttgttgttatcttttgttgatgacaattcaagtcctcccttgctgtcaggatggccatgcacatttatagagtacacgataatgcgacatcctatgtagaaggaagttacttatttatttaggaaaaataaagcaagcgtgcctggacctgagtgagaaccgatcgttgcgcctacttcatgaatgacgaagcgttcgctaccatatgtttcttgaatcgcgctttttaatttttcggcgctttcaagatcgtcaccgtgcgagataccgattaattgagactgtagattgacgccgcgttcttgcatgatctcaaccatccgctttgtcactttgtttttaccacgtatcttttcaatagggataagctttccgtcatccacatgaagcactggtttgatttttaacattccgccaaagaaggcagaagctttacttactcgaccaccacgctgaagaaattcgaggtcatccaccgtgaaaatgtgctccatatgtgttagataatggttgtgtaagctttcagaaatctgttcgaacgatttaccgttctcagcaagctcggcagcatgaatcgccataagtccataaccaagtgacgctgcctttgagtcaatcacttccatttgaacgttagggaattcttcctgcacttcattttttataattgcagcagattgatacgttccagagatacccgatgatagggcgatataaatgaatggctgacctttctcggcatatttcataaacgtttcttttattcttgctggaggaatttgcgacgttttagccattgttccttcgcgtaacagtttgtacaattctttcgcttgaatttcttctcggtcgtaatattcttcctcgccaatgatgaccattaaaggcatgatgtcaatttggtgctttttcacaagatcctctggtaaatctgaggcgctatccgtaatgatttgaacgttcatattggaccatcgtcccttcatcaattattaaatacgtatgtagattgaagcttgttttcttaaagtttatcccctagtctaatggaaatcaatcctattgaagaagttgaatagaaaacagttgacgtagttgaaattgtttgtttagataaacatggctaagtcgaagggtttgtttgtaaccaatcgatgaacgacaaagtgtttgagcgaaaaaatgattacgtgagaactcaattaaaattctgtaaacgagttaaagctctgtttcaaaaagaaggtgctatgtttggaagaagtaaaaaaaataattgtcattctcttaggtgcgattctcggggctgtttctcttaacttgtttctaattcctgcaaatgtgtatgcgagcgggtttacagggatagcgcagctcatttcaagcgtactaagtgattatacacctattaccatctcgacaggtattctgctcatgttactcaatattcctgttgcgattcttggatggaagaaagtggggaagtcctttacattatatagtgtgattagcgtaggggctaccactatattccttgaaatcattccagtccaagcgctttcagaagatattttgttaaatgcggtatttggaggcgtcattgcagcgattggtatcggttttacgttaaaatggggggcttctaccggcggaatggacattgtcgctatgatcctttctagaatgaaagatcgtcccattggtacgtacttctttagcatgaacgcgttgattattttaacagcgggaatgctgtacggttgggaaaaagcgctttacacgctcgttaccttatatgtatcctctcgcgtgattgatgttattcacactcgtcacgaaaaactaacggccatgatcgttacagcgaaaggtgacgaaatgcaaaaagccattcacgatcgtctagtaagaggaatcaccaagcttccagccaaaggagcctaccgcggtgaaccaaaagaaatgctcatgatcgtcgtcacaagatatgaactctatgaccttgaacatatcattcaagacatcgacccaaccgccttcaccaacatcgtcaacaccacaggaatatttggtttcttccgaacggatggttagaaaagcggaagtgggcgtttagggtcgacaagcgctggagccttatcaaaataacacgctcttaaagctctcattaaaaaaccgaaaaaaccataattaacaaaaaaagttcctcaagataacccctgaggaacttttttctatgcgttattagagatagtttcctttacttcaggaagtaaagtatcccaatctgcttcaggcattttgttaatcgtaatgaaatcctggtaaccaaatacattatcaacgccctctaattttagaagggcagctgccatcgcatggtcagggttatcgttcttcttaaaagagtgacttgaagacccttcaaaaagctgctgatcggcagtgattttaactgcatttgggtttggtgtacggtctacgcgtagttccatagtatacgcctcctttcgctttcatctattagtgtatcagaaacgctctttgcagcatataacctttcgggttaagaagagaaagtaaagccatagcgatttgagacaatatcgtgaaacccaagagaattatacaaatgcttcgtaatcgcattgttaatgcccgtttcaagttcgatgcctttaatgccctcattctctgcccaatagatcacatgaagaagtagttttctaccaatcccttgattccgagcatctgggtcaacaaacaattcgtttaaccaaatataaggacctccacttgcgagactaactccgatattaaaaaaagctacgccaagtacttcatcgtcagattctgcaatgacgattcttgaagcagtttgttcttcaagagcaagctttacccctttaacgagcttttcatagcttccattctgatcagaacgggtaatttgcttcattagtaaatttgataccttttcaatcgtttcttcatctgtctggctcgataattggtacacattcattaccgttccacctccgtcatactgtttcgaccccatcaactacaatcccttttaagaggccgagaataaaatatttatttaatcactggaaatttgaaacattcagccatttccattcgtctataagatagggaaggagcttacaagatgaatattaccttttcatggagctctggaaaagatagcgccatggctttatatgactgtctctcacaatctcattttcaagtgaaaacgttatggacaacggtgaatgaaacggatgggtccattccatttcacggcgtcgataccgcgctattaaaagaacaagcagatgcaatcggaatctctctaacgataaccaatttaccagataattgtacaaataagcaatacgagaatcttgttcggaagcaatataaagcatttcgaaatgaaggactggaaggtgtcgcttttgcggatttgtatttagaggacatacgccactatcgcaacactttgttacaggactatcaattaaaagctatctatcccatctggaaacagccaactttacatacagcgaaacgatttctcgccgatggatttaaagcaatcatcacaactgtcgatcaaaaaaaacttcagagtgaatgggtaggaaacccattcgatgcaacctttttagaagcacttcctgaacacgtcgatccgtgcggagaaaatggtgaatttcatacatttgtttatgatggaccaattttctctaaagccgtatcttttgatatacaggagatcagaaaaaagggatcctttcataccgcgcgattaactacgaaatgggaaaggtaaggaaagaaggggggagaagaaaatgccagtacttgtttgttttggggactgtctgacagctagagaagtagacgataaaggaaacgagcgactgacttcaaggattagaggagctcttgatgaatggatcgtaatcaacgcaggttcaacgccaacttctcgtgaaggagtgtcgcgatttcaatcagatgttttaagttaccaaccggattatgttaccattttttttggtacacaggaagcttgtctgatcgatggttcagatataagtgagtttgaaagaaatattgggtatatggttaacaaccttcctccagagcgagtgattttgatatcaccatcacctgtgatgaatgaggaaaatgcttcgatgacgaatttgaaaattgaagggtatgcagaacgaattcgttttttggctaagaagtttggaacgagacatattgatctctggcaactgataaatgaaagtcgaaaaagtaaaacgctttatgagaaagacggcgttcagctaagttccagggggtataaactgattacgaaagaagttttaaaatcacttggtagaaaaacaaggctaaaaccaatgattaaactattctaataaatgggacgaaaaaatttaaggaagcgtccggtccgcaaataaagaaacccgtcacgaattgacgggtttcttttatggggaaaaattaaaagggtttattggatgcttcatggctaagttcttgaatgacttcctggtatgaagtgagctgttctttttcagcgctagttgattgatggaatgcagcagaaagattgttaagggccacgttgatttgattctgcgtatctggatgtccgcttgtagccatttgttctgctctttctaccgcttcacgcgcaagttggaaataacgatttcccatcttcattcaccaccagacaaattttcttgttgttgtttctttctttgctgactgcttaaacttgtcaagtcgtgctgatccatgttttgaacggcacgatctgcgccttcttttatcattcgcttcgttttgctgttctttgccatgattgaatccctccctttcctttataggatgagttcaacgatcagttattattctgcattgatctctcctttacagaatataaaaaaacagcttatgatagctgtcttttgtcagaaatcgagagtttcagcctttcctcaagaaaggttgcaatcccatcttcttcatttgttacagtcacgtcattcgcgatattttttaactcctcaattgcatttcccatcgcaacgccagtccctgcgtattcaatcatttcaaggtcgttgtcttcatcgccaaaagcaataattctctcttgaggaacgttaaagtgagctgctaaacgctgcaaaccgactgctttgtttaatcccacccgaacgatttcgatgatatttaatggagccgcccaaaccctgtgctcaatcatttccgcatggtgatctctcaacatttgcctcagatccgccagctgttgctcgtgcggatgaatgagaagagaggttggatcatcctttagatttttatggatttccccagtgaaaatggaagagtcatttataatcatattttgcataataagctcatcatgctgatgcaggtaaacatcatcaagcacttcagccataatattttttacattaatatcactacaggaagaaacgatggatttcgccgtagttaattccattggagaatgatgagttccaaaagagcgatcgaggggatggtgaacaaatgccccgttaaaattaacgatcggagaatcaagtgctagttcattataatagcgaacgcttgcccgataaggacgacctgttgcgattgcgacgtggtgaccttgccttttcgcttcaaagatgacagatttcgtacgttctgaaatattcttttcgctgtttaacaacgtgccatcaagatcaattgcgattagatgcggtttagttgtcatagaagctcctttgaaaagtgtctttttgttgtagcgcctgttcgtctacaaacttattgtacatggcataagattaagtgtctattttgttatattaaaattttgacaaaagtattaaaaggaaacgatagtcgtttgaggaattattaagaagggtacactacaactatcattccattggaggtggcagtcgattatgactaagaaacaaacatggctaatatcaagtattgcggcagggacaatcggcatttcatcctatttgctaaaggatgaagaaaagagagcgaaattaaaaacgaaggcaaatggtctgcgtaagcaagtgtcaaagaaatttagtgacagcttgccaatcgaaaaagcaggcaacccaacaacacctgatcaatcagatgatagcggagatagcaagatggtttatgaaggttcacagtttccaactcaatactacaataaattagaaaacatgaaatcagttgaaaaaagtcacgaagagcaagtgaaaaattaacgaatttgacatgcaagcagtgcttgcatgtttttctttgcttgcctgacttcaaatttctcatgtaaccatatgaatggtacgatagataggacggttactaaaggaaaggggtaagctaatgattacaattgtaaatgaatacatagagaatatacccgttctacacgtggtagacggtgaacttgcgaatgaaaaacttccgctcattatgtttcaacatggttttactagcgcaaaagaacataacctacatattgcctaccttctagctgaagaagggtatcgcgtgcttcttcctgatgctgttcatcacggagaacgcgaaaatgatctatcagggaaaaagcgtcagtatgtgttttgggaaattgtgattcaaagtttaacggagcttgaccaacttagacagcaccttgttgatcgaaatcttgttcaagaagatcgaattggcatgtctggcacttcaatgggaggcattctaacatttggggcacttacacaatatccatggattaaagcggctgtttcattaatggggtcgccgtcttattttaaactggcgaacgctcaaattcgctatttgaaagaagaaggattcagtcttccgatttctgaagaagaaatgaaaaaacaaattgaaggtttacagtcttatgacctttctttacaagaagacaaacttgatgggcgtccactcatgatgtggcatagcacagtagataaggtcgtgccgtatacccttacgtatgatttctatcaccagattaaaccgctctatgaagggaaggaagagcatcttaaatttattaaagatgagacttccggtcataaagtttcacgagaagcagttctggctttagtggactggtttaaaactcatttatagaattaagccttttcggtttaagttaaatctgaatttgttataatgaaagttggaagcacttgtatgaaaggagagatttcaatgtctgagcaaacagatcaagaaatgagagataaattatttgaagctctggaaaatgtgattgaccctgagcttgggatagacatcgtaaaccttggcctcgtctacgaagccgatcttaacgatgaaggtgtagctcaagtcgttatgacgttaactgcaatgggttgcccattagcagggacaattgttaacgatgtaaaacgcgccctatcagatgtggaggaagtgaacgatgctgatgttaacatcgtttggaatccaccatggtcgaaagacaacatgtcacgctatgcaaaaatcgcacttggcattacatgattagaaaaggaagagggactccctcttcctttttattttatgttttgtcagcaattatagtaaaatgacgtttctattctgtgcgttcaacgacgattttttcgttaatcatcttccagatcgcagggtcctccatcccgagtcgccataaggctactccctggacaccaagttcatcggctaaccgaatttttgcttcaatgctttgttcgttttcaaaccagacttcgtgcttatttccttcctcatctgtatagcgaaagaaaggtgttttccgttcttcatcaaattctacttcggcgttgtacttcttttttaatttcatagccatatcatacgtgacgtacgtgcttttttctttatcaagattaaaatcaaaaccaaacacagaaatagcggatactaacttttcaggaggaattctcgttttggcatatgtcatcactttttccatccatccggctgtcacggcaggacctggagggctacctggccagccaaattcgttataaagcatgacgataaattgatcaacggctttgccgatctcagcataattaaatggatctgaaaatggattaacaagttcatctgaagctcttgaaggaacgcttgctgagaagaaatatcctttcttacgaagctcttctccgattgtctggtaaagaagcgttagtttatccgcatcttcaatatagacgtcttcaatgtcaatatcgaccccatcaaaattatatttttcgattaatttaacgagattttttgcaaatgctcttcggttttcctcgcttgaaacgagtgtctgaacaaccttcttacttggttcggtgtcgccctttttatacagtaagttatgcacaacaggcatgattttaatgttttgatcatgggcaagttggacaagtttctcaatttctctgtcgctaaacttgccgaacttctcaattgttgttggattctcttggctgattcgaaaaagaaatagagctagctgcgaaagggcggatcgattcgaaacaaatgatttataagaagaagggagcgacgggccttcttcaagcgtatagtaaccgataatccgtgatacgggcttttcgtctccatacgctttaaatgtaacgaggctatccgctatccaaccagtcgtaccatcatatagctgcactttgtaccaatttccacgaataccttcaaccgcaagcttcgctccagctctcaattgagcaatgatgttataccctttgcctgggccagttctcacattcgctcggtcagcttttacaacgacttctgtatatactggaatctttaatgtttgacctattgagagcgcatctgatgttaaatcattcaacacctgaatactttgtgctgtggtaccataattttgggcaatggtgtacaggctgtctcctgcttttactttatagtcaatgcgcattgatcgagaacggtttaaagggagctcaaggcgttgaccaacataaataaggttagatggcagttgatttagctctctaacttcttcaactggaacgtggtaatcttttgaaatacttaataatgtatcgccttgtttcacagtatacgattgattagttgaaggagaagggattcgaagcatttgtccaacgtaaatgatgtttgaattaagctggttcatttgcttgatttcattcacggattgatcgtgcgattctgcaattttaagcagtgtatcgccaggcttaacccaatattctttttgaggcatgatcatcactcctttccatataagatgcatcactaacaatctattcacggccatcttcattcattcgagttttccatttaaacgaaatgagcgaatttttgttacaatgaagaggaaaatgtgaacagatggagatgagatgatggtcgagagaagaaaaccaatcacggtggaagaagctgttcaaaaggtaatgaacctctcttatgaaggaatgcttgaaacagtgcgattagaagaaagcgatggtcgtcatctcggagtcgatgttaaagccgatcatgatgttccaccgtttgatcgttccccttatgatggctttgcgatccgagcggaagatacatatgaagcttcgaaagatacgccagttaaattgaaagttattgaagaaatcggagcaggcactgtggcctctaaagtccctgagaaaaacgaggcgattcgtattatgacgggtgccgctatacctgaagagacgaatgcggtgatcatgctcgaacttgttcaagaaatcgaggaagaagatcagccattcattcaagtgaagcggaaagtagtaaaaggagacaatctttctttacgtggagaagatacacagaaaggaactgtacttattgaaaaaggaactctaattacgcctggggttaaggcgcttcttgcaacatttggatatgcaaacgttccagtagctcgtaaaccggaagtaggcatatacgctactggtacagagctattggatcctgatcaagcgcttcaaccaggaaagatacggaatagcaactctcctatgatcgagggacaggtaaaggaggcaggagcaacaccgctttactttggaaaattagaggataactttgaaacttgtttttcttcaatcaaagccgcgttaaccaaagtagattttcttattacaacaggaggcgtatcggtaggcgattatgattaccttccagcgatttatgagaaattaggggcaacggtgttatttaataaagtaggaatgagaccgggtagtgtgacgacagttgctgaatggaatgggaaattactatttggtctatccggtaatccttctgcctgttttgtaggctttgagttattcgcaagaccaatgattaagcgtgcgctcttttcgaagtatccttatcgcatgaaaagccagggagaactgttaacgaactttccaaaacctaacccgttcacaaggtttgtacgaagtagaacagaagagaaaaacggtcgactttatgtgaaaccaacgggacttgataaatcaggaagcgtgacctctcttgccgaagcaaatgcttttgtcgtgttacctggaggaacacgtggattcgaggctggagatacagttgaactactccatcttcgtgaaggtgggtcggctacgtggtaaaaacaccagtgattcaggtcgtaggataccaaaatagcgggaagacgctttttgctgaaaaattgattgaacaagcgtcatcacatggcataaaggttggcgtgattaagcatcatggtcacgggacacctgacgtatatgatcagaaaaaagatacaggacgccatcgaaatgccggagccgttgtcacgggggttagcggtggcggaatggtttccattcatgcaacgcagggaagcgaatgggaacttgaacagttaattcgtttttacgattcgtttgatcttgatcttattttagtggaagggttcaaagaagagagctatccaaagattgtgcttttaagaaataaagatgatcttgacttgttaaacaaaaatcaaatcattgcaacgatcatgaaagaagcccacgatgtttcggttgataatagctacataaatgatcaaatgaacgactgtatagaagatgtgttgaaggatgttaggagagggtaacaatggaatattataagataacttctgaagaaattgatgtaaatcaagtgataactagcgtgatccgtcctgaagctggggcaatcaacacgtttattggcacggtaagagaatttactggtgaaaagcagaccgtttcgctacagtatgaagcctatccttctatggctgaaaaacagatgaaacgaatcggaatagaaattcgcgagcaatggcctgatgtccaaacgtcgattgtgcatcgaatcggaaaattagccattagtgatgttgctgtcgtgattgctgtcgcatctccacaccgagcagaaagttatgatgcaagtcgctatgccattgagagaatcaaggaaattgtcccaatttggaaaaaggaatattggactgatggagaagaatggattggggatcaacttgaaaacacggcatacaaaaacggagcaccgaaggaggaaaaagaatgattaccgttcttttctttgcaaaacagcaggaacaacttggcttggaaaagttagagcgctctgaatcacagcttgctgtttctgagctgaaacaaaaactgatagccgattatcctgagcttactcttgctcatacgatgacagcgattaatgaagagtatgcggaagaagatcaagtaataaacgatcgtgatgttgtcgcgtttattccaccggttagtggaggttaagaaaaaacacccaaatgggtgttttttgtttgagaagggatacttttcccgtttcgcggatatattcgtattttcgcggaattaacaaccgatttcgcggaaaaaatcagaatatcgcggaattatttgaaatatcgcggaattgatggtcaaaaggggtgcgatatctccgtttctcttcgcttttcgtgagatccagctcagtgggcaggtcctcgatcgcttcaccatttcatccgaacacaaagggcgtgttcggatgaaatgcctccagcgcttgtcggacctaaacgcccacttccgcttttcgtgtctagctgcgactcgcagaaactgcgatatttcactctttcaccagaacacaaagggcgtgttctagttcaagagttccaatatcttcgtttctaaacgctcgtctccgcttttcctagatccagctgcagcgcccagacactcggtcacttcaccttttcatccgaacaaaaagaccgtgttcaaatgaaaaggctccagtgcctgccgtgtctaaacgggcgcttccgcttttcttataacctacaaatcgtgattgggcagtcttcgcagtggatggcgcagcggaggaattcgaggtcgtggatggtgatttttccttgtttgactgagacgatgttggctttttttagttcgcttaggatgcggttgacgctttctcttgtaagaccgcagaagttgcctaattcttgattggtaagggaaatatcgattaggatgtcatctttctttttgacgccatatgtattggaaagacgaattaaagtggagtagagggctcctttttttccgtgtaacaatagatctcgaaatttagattggttttttctaaagttttcacccataaatttcataaattgagtggcgaggatggcatcgctcgttaacgtatcttcaaggtgagcctgtttgacaaaggtagcttttactccatcaactgcccaggcgtttgcggagaagttaagttgtcctgtataaagagcgagttcaccgataagatcacctggctgacaaatttgaagcgttagttctctaccatctgaggtcagcttgtttaatcgaacgtttccagactgtataagaaaaaggcgatccgctttcattccatccatataaagtggttcgtctttttgaaatgaaattgattcgccttcttcagcaatccactttttcagtgcatctgagttgatcgtatcttttttcattttcagcctccctgaatcaatttacgtactattatcccacgttatctttctccactacaaccgtcatttccttgtatttgtcatatctatgttataaagcatataaaaaaaccggcattagccggttaaaaaataaggacaagtgctcctacgataaagcaataaatggagaaataaatcaaattacctcgagccataatattcataaaccactttaatgaatagtatgaagctgtaagggataataaaaaggctataatataagggataagcatatcgccaaattgaaggtcgccaatgctgaggatcattgaccctacgcttactggaataaacaataagaaagaaaagcgtagcgcagtttcttgcttcattccaagtcccatggcagctacaatcgttgctccagagcgactaatcccaggaattaaggcgacagcctgagctagccctacaattagcgcatctttaaagttgagagcagattcgccttttgatccgcgcaagttacgtataagccatagcgcgataccagtaatgatcagggtagctcctactactttaagaccctttaattgttcaccaatgaaatcttcaaatagtaatccaagaaccgctgcaggaatcgttgcaacgataaggtaaacgatgaacataaattcgcttttggactctttatctcgagagacaacgtatcgtaccccgtgagaagtgaggcgaatcaggtcgtcgcggtaaataagaagaaccgcaagcaatgaggcaaagttcattaagatttcaaaactaagtcctttaatttctagcccaaagactttctgtgctatgacaaggtgtccacttgatgagattggaattggttcagtgaagccttgaagtaaaccaagaaaagcgtatttaagtaattccaacagttccatgagtaatgctcctccagtaattgttacaagataaattgacacatgtaaccattaaacaccagtccttccatttttgtaaagggaaatttctagtcaagttacataaaagagtattcgctgatgaatgctgataaagggggcaaatttagacaagtggaaggaggcagatgtatgggcggagaaaatcgtcaatttacacctgggcaaaaagcaccaaacaatggaatatacattgaaatcggagagacaggtggaatggtgaaagatccgaaacaaattgaacttcgtgccggtgagccgtttcctgaatgttcaaatcaaaatcggaagtggtcaagggaacctaaaccgcatcactaatagcaaaaaagattgtacaaaaaaacaagcgccgtaagaggcgcttgtttttactgttcagcagggtcggagatgagaccttctcctattaccattgccgcaacggctattactactccaaagagagatgcggctccaaattcataatggccgccttgcattgatgcaagtacgtaaaaaatcatattactcagtagaaaaccccaaataattgcccataaaaaacgcacgaaattcacctcatttgtaaacgtattctatcgaatatcataccacaaaactgtcccattcaacatctatcaattttaattcatcgtataaaatagccacgataaataagtcgcaaaggaggtccaaagaaaataagggactagtaaccagcctgcgacacgattttgtctgcctgcaagaaagataagaatgagcgtagtaatagcgatgaaaagtgcatccataaacgttgcaaaaagcgcgtgaagatcaaattgcaagtaactaaaggcttgattcaatatgtagttaatacccagaagtgaaatgtactcactattatggcgatcaaagccgcgtttttggtaaacgatcgctgtagataatgcgatgaaaccaaaaagaattgcccaaataatgccgattacagagccgtctggtgtccagtctggctttgataaagaggtataccaatcggcgtcaaaaggaaataggaatccggaaatactaaaaagaaggtacacaactacaaaaacgagaacagttgattttttcattctttatcaccaccttcctttccatacccaaaaatatcctaactcatgcaaaggtatagttggaaaaacggaacatataatggtggaaggggttttttatcattttttcagtaagtgaaaggtgaaattccctataaataggcacttcaccctttcttccaaatgccacttgcatacgttatacagaaagtgataaaagggcgaggggagagtatgtgtattcgtaaacgagcctatcaattagacggggagtggacgatcgttctcgtccctgaacggcctaacgggtttggcattttcattataggtggtttaacccattttgtagacgctgatacgagtttttggttgcaaaatcacacccgtcaaggaatggttgctgattttcttgatgcaggctataccgtatacacaagcaacttatatggtcggcactgggggtcaccaaaagctgtgaaattaacggaaagaatctataatctggtgcataaacaagaaattcttaatccaaggatccatgtagtcgcagagggaatgggggttcttgctgcgaatgctttcttaaacaatcgtcaacccctcattcgttcagccgcaatattaaatccttgttttgatgtgaaaagtcttgttcatcaagaacagatgaatcgcctcttttataaaaggttagtaaaagaaatggctagagcatatgaaattcaaagtgaagaggttatacctaaaatagaagaaaaagaaatgataacgtctacttgtccgattaaagtatggcatcattcgcttaaaagtccgtactcgcttgaacaaattcgagtgtatgaacgtgttcagagggaattaggctatcccattgaacttgcactattaagcgatagttatcaatccctaggtaaaaagatgattcgattttttcaagaacatgaaaatctctaagtaactaacgcttcagccttgtaatgtccatcgctggatgatgcccgtataaaataaggtctttaaggatttcagcaccaagcatactgtaaactgtaccgtttccaccatatccaagcataaaatagacgccgtcatatttgggatgcttcccaatgtaagggagaccgtctttcgttgagccgaagattgcactccattcaaaagcaattgacgtttcaatggagggaaacagatcatggagtttattcaacaattgttgaccttgctgctctagcttttcttctttatttaaattggcatccaacccaccgatgaggatacggcgatctggtgttgtccttaaatagtagtaagggcgctccgtctcccaaatgagtgattggttgtgccaaccaggaaatcggtcaatgggttctgttgcgattgtataggtgcgctctaaaagggcgccttttgttttggcaaactcctgtgttccatagccagttgcatagataacgtgtttcgtacgaatttctcccttttcagtttggaaaatcagttccctattatgaaattggtgagaaagcacttcagtatgttcaaatacgttaacacctagatcggcgctgcatgacttgcaagagccagggcgaatttatagggatttacttctgcctcggctttcgtgtagattgccgcaggtggcttgaatgagtagaggttttcaatggcggtggagtctaaataatcagcgttaaacccatattattaaagcatcgtactcctttttcagttttttaacatgatgttcattacttgcgaaataaaggctctccgtccgcttgaaatcggtattttcttttagagtggcattatacttatcaagttcatcaattgcctttaaacaaagcttatagaaatagacagctttttcttttccaatccggtcgataaggtctattaacatggcatcattagaaaattgaagaagaccattgtttacagaagtacttccagatgcaatcgtatctttttcaattaaaacggtatcgatctggtagtctgcaagaattcttgccataattgatcctgacattccaccaccaatgattaacacatcacatgtgactgcggttgtaagttctggaaatgcccgtgacttttgcacagttgttggccaaaataaatttccgtgatgtagctccatgatgagaatcctcccttttcaatcagcgacattgtgaacgctattagaatgatcgtactgaaacaaaagtattcttaaagaaattgaggtgggaaaatgaagaaagtttttataacaggtgggttaggctttattggttatcatttaacagattttcttttaaataaaggaatagaagtcgtagtaatagatgggaaattagatgaaagaagaaaagctgaatatgagatgaaagaaatgatgcttctgagaaacgcgaattacaaacaaataaacagtcggatagaggaagcttcactaggtcatctatcgaaagactgtgatacgatttttcaccttagtgcaccaaaagttatcaatgtgaaacaaggttcaaaaatgattgaaaatagtctggattgcactcgaaacgtagtggaaaattccaaaggaaaagtgctcgttcatttgtcaagcacagaagtatttgggacacggtatgggagtattacagaaagaacgcctcatcatcctcattcgaatgttggaaagctaaaatcagcagaggaacaaattcttttaaatcgtaaaagtgatatcgtaaaaattttacgtcttccgcttgtatatggtccgtggcaaccatcccatcatgttttccaatattatttcttacatcataagcttccactgaaatatgaagaagaaggggtaaactttcatttcgatgctgtatatgtaaaagacgtttgtgagtccatttatcaagccgcaacacggcgtgaacattcagaaacgttcaatctaacaagtggaagagaaggagaatggcaaagaggagtcgaatggtgtataggagattcaatagacttacatgatgaaaagaaattaaggtgtgagatttcaaacaaacaatgtgcaagtaagcttggttttaccaacatcacttctattgaagaaggattgcaccaacagcgtctgcacactgaaaaaatgatcgcatttgatccttcaatctacttaacgtaatttcactgactgagaagggaagattctgcatgattgaaaaaacactaggtaattatgatgtacatgattcctctcatggccttcaagctttaaaggaaacgagagaaaaacttctttcaatggtaagtgacattgaatttcaggaacttcactatggatactcaagttttcctacagttggagcctatttacttcatattgcacaaatcgagctttggtgggtaaagaatgcgcttatgggtgagagcgtaacagaggaagagaaagagcggtactattttcaggaagcacaagtcatcgctgcacccgatgacaaagaactttcctggtttttagctcgccttgccgaagcgcgtgattatattcgagcgtattttaatcagttgtcagacgtggaataccggaagcctggaccagaaattacgattaatggggaaacgtttcgctattctcctgaatggattattagccatttaattgatcatgaagcttaccatagaggacaggctgcaatggtattgaaaatggtttccggacagcgagaagcatgggagcatttcaatacgccgtatttgtcgttataatagaggatgagccttttaggcgaaagtgaattaggagtgaacgaaatggatcaaaacatgagatttatgcaaattgcaatgaagtatttacctgaagcgaaacaatcgctcggtgaacaggacattgaacttgatcttgaaaaaatgcagccgctacttcagctctttcttaaagcgatggaagatgcttatgagcttggaaagcaggatgcacaggaataaggagagaataaaatgggccgtaaagctttctggatctggtttgtcccactaggtggcttattgattggcattttaatcggcagttttagtttaatggtcatctctggcatcttattatttattagtgcgggaagcatgctgtttctttccaaatgaattgaaaagacgtgatgccacgtcttttcaattattttacgaataagttaagcaatgatcccatttgttttaccataggtgtgatctgttgaactgtattcatcattttagggaagtcatattggccgttttgctttttgaactggttcataaatggctgcccaccgggatacccttgataagggccgtatggttgttggtaataagggtggggatagtagggctgcccaccaggataataattttgtccctgatagggtggataaggcggataaggtgtgaacggttgttgctgatacggttgatagccagagggttgattataataaggctgttgctgataatacggatacatccatctatcctccttcattcaagtttacttataacttagcttatgaacctcctacgctaaaggtgtgtgctaggcagtcaggtagacaaatcgttcaatatggcttaaaattagtaccagctactaaagattggttttaagtacgaaaatatcctataaaggggaaattcaagatgaacgctggtttactaggtgtaggacattatgtaccagaacgtgtattaaccaaccaggacttagagaaaatggttgatacatctgacgaatggatccgcactcgaacaggtatcgaggaaagaagaatcgcagatgatgatatgaatacatcggatatggcttatttagcttcaaaaaaagcccttgaagatgctaatataaaagcggaagatctggatcttattttagttgcgaccgtaactccagactatccattcccatctgttggctgtttgcttcaagagaaactaggagcaacaaatgctgccgcaatggatttaagtgcagcttgtgcaggtttcatgtatggcatgattacagctggacagttcattaacaacgatacttacaaaaatatcctagttgtaggggttgaaaaactttcgaaaatcacggactgggaagatcgaaacaccgcggttctctttggtgatggtgctggagctgccgtcattggtccagtaacagaaggaagagggattctttcatttgaacttggttcagatggggcaggtgccaagcatctctaccaggagccaaatggctttatggcaatgaacggcagagaagtgtttaagtttgcagtaagacaaatgggtcaatcagctattaatgtgattgataaggccggtttaacgaaggaagatgttgatttcttaattcctcatcaggcaaacattcgaatcatggaagcatccagacaacgactggaactcccagttgaaaagatggcaacaacggtgaagaaatatggaaatacatcatcatcaaccattccaattgcgctttcagaagcgatggaagaaggcagagtgaaggatgacgatgtagtgattcttgttggtttcggaggcggtttaacttggggagccgttgccctcaaattaggacgctaaaactgtagtagtgaaaaaaggagcgctggtaaaaatgaagagaagagttgttattaccgggttggggacggtttccccacttgggaattcattagaggaaacgtggacaaatgtagtgaatggtgtttctgggatcaacccactaactcgtttagataaagatcagttcgcagcaaaagtttcaggtgaagcgcttgagtttgatccagaaaaattcatggaccgtaaagaagctcgtaaaatggaccgttttacacagtttgctgtagccgcttctcaaatggctgttgaagatgctggtttaaagattaatgaagataatgctgagagagttggcgtatggatcggatcaggtataggcggtatggaaacgtatgagtcgcaattccgtacgttcatggataaaggcgctcgtcgcgttagtccattcttcgttccgatgatgattccagatatggcgtcaggtcaagtttccattatgcttggagcaaaaggaattaattcatgtaccgtaactgcctgtgcttcaggaacgaactcaatcggagattcgtttaaagtgattcagcgaggtgatgcggatgtgatgatcaccggtggatctgaagcgccgattacaagcatgagcgtagctggatttggttcaatgaaagcactatccacaaatgctgatccagcatctgcaagtcgcccatttgatgcaaaccgagatggatttgtcattggagaaggtgccggaattcttgtcatcgaaagccttgagtctgcagaaaaacgcggtgcaaaaatttacgcagaaatcgcaggttacggttctacaggtgatgcgtatcacgttacgcaacctgcacctgaaggagaaggtggcgcaagagccatgcaacaagcaatcaatgatgcaggtctttctccatctgatattggctatattaacgcacacggaacaagtacagattataatgacaagtttgaaactgccgcgattaagtctgtgtttggagagcatgcttataagcttgctgttagttcgacaaagtcgatgactggtcatttactaggagcagccggcgcggttgaaggtgtattctgtgcaaaggtattagaagaaggaattcttccaccaacgattaactacgaaacgccagatccaaactgtgatcttgactatgtgccaaataaagcccgcaaaaccgaagtgaatgccgttatgaataactcacttggttttggtggtcataatgcgacattagtgtttaagaaattcgtgaaataaagaacgtaacctctggggaaaacccgggggttatttttttgtggacggggcgggggtggtttataaatgcttgtctccgcagcgcctgtgggccctaacaaccagctccgcttttcgtctgatccagctgcgactcgcagaaactgcgatatttcactctttcaccagaacacaaagggcgtgttctagttcaagagttccaatatctccatttctagacgttcgtcttcgcttttcgtgtctagctgcagcctccagaccctcggtcacttcacctttcaacctgaacacaaagggcgtgttcattttgaaaggctccagtgcctgccgggtctaaacggaggcttccgcttttcgtgtgatccagctgcagtgggcagacactcggtcacttcaccctataactcgaacacaaaggacgtgttcaatttggatgcctccagtgcctgccgtgtctaaccgcccactttcgcttttcaatgtctagctacgactcgcagaaactgcgatatttcgcactttcactagaacacaaaaaacgtgttctagttcaagcgctccaatatctccgtttctaaacgctcgtctccgcttttcatgtgttctattaatcttttcttaataatatattgattatggaataatttaacttggtcctgactatactgtttttacaaacagtagcgaagtgaggggtagccagatgttgtatttgcgagatgtttgggtgaattggtttgagggcgaagagaatggatataacgtatgtaatttccatgaatggcgtaaagatgattttattgaactattggatcaagtgcctgtcattaaggtagaatcggtcttgtatcattatatcgagaatgatcttactgagcttccggagagtttgcttaatgatgtttttcaacagagctatattcgaaagaacaatgaacgatcacctttagaatattgcttcctggctacggatggcagaggtgttatcgtgattgatacattaggatataagattccgattcgtaaaagtcgagtgattccaagacaggaaaaagcggtttatgaaatggtggcagatattgaagcaacacgttacccatttgaaacggatcaacctatgaaggagcatcatattctttcaccagaaccagacattatgatggggttaacacgaaaggaaagacagttaaaacagcttttgtttatggcactagatcagctctattcaagtgggaattcagctgaaataaggtattggttcacagaatgccaacccaaaaaatatgtgcagatccaaaacatggaaatggacgaggcatgggaagggctatatcgagaagtgaaagcaggttggtcagcaaaacatgagcaaatttgtgaacggattattaaaggacaaccgtattttgaaaaaatatgggagcttgaaaagggaacgcacgtaaactaaaagaagaaggctgccgttggcagccttcttctttgttaattggatcaaattatcttctttttctctcaagacccatcgcacgctctgctttggctagcattttagaagctttacgatttgctttttcagcaccatgatcaagaatgtcatctaactcagctgatgcaattagttcgttgtatcgttcttggatcggtcttaacgtttcagcgatcacttctcctagctctgctttgaagtcaccatagcctttgccgtcgtaaagcgattcaatttcttcaacacttttccctgaacaaagagagtagattgttaacaggtttgaaatggctggtttctcttctttgtcatatcggacaacgccatcagaatccgttacggcccgctttacttttttaataatcgtagcaggctcatcaagcatagagatataggcattttgattggagtcagatttactcatttttttcgaaggatcctgaagtgacataatgcgcgcgccaactttaggaatacgggcatcaggcataacgaagatgtcgttatatttacgattaaaacgctcggcaagatttcgcgatagttcaatgtgctgcttctggtcatcgccaacaggaacaatttctgtaccgtataaaaggatatccgcagccatcaatggtgggtacgttagaagaccagcgcttacagcatctttaccagtagatttatctttaaattgtgtcatacgctcaagctcgccgatataggatacgcattgtagcatccaggcaagctgcgcatgagccggtacttcagactgaataaataacgtcgatttttcaggatcaatccctgatgccagatagagcgcggcaagacttcttgagttttgttttaaagcctgtttttcttgagggactgtgattgcatgttggttaacgacacaaaagtaacattcattatcgtcctgcaagtctgtaaaatgtttcattgctcctaaatagttaccaattgttaacgttccactaggttgaattccggaaaaaataacgctcattagtgtagtgctcctctcaatatcaataaaattgaatacaaaaaggtccattcctccctttattgctagggacgaatggaccgtggtgccaccctgcttatccagtaagactggatcacttatggtaatgaataccgctagtggtaacgtgaatgctcacgccaatgcctacttactcgttcagcaaaggggctcagaagtccattccaaatagtgtgttacctgttttcaccgaccacaggctctctataaacacatcacattgtactactcttcctcaaagccgttctgtatccttcttcgttactagtatagcgcaatgatttcattcgatgcaacaagttagctactgaatgagagcaatggaaataataatcgtaacaatcgtacaaaaagcaccagcgattagaagaggataagtaattgggttatcataatcaagctgatatttaatttcagaatgatcttcttcaatcatttgccgtttagctgtatttcgaaaatatcgtttgaaggaatagacgatgccatcgaagaagccagtctgaacaacgtgaagagcagccccaattagtaacattccaagagcgatcataaagagaatatcggaaactggctgtaagccaaatccttcatcagatgtaatagatatgaccattgaagcgacaatggccaaaaaaaccagtatacctgacttaaatataagtgttttcatagcaacccccaatttctttctattgttaagtataaaaaaagaaagggccaaggacaataaagaagcgataaaaagcgtgaaatatgtaacgactttacacatcgttcatatttcagaatatttcgcgacatgcatacagtatacacgaacgtatactatatactttcaggtaagggggatagatagattttcatacatttctctgtaaaaattaaaatcttacccataaaccagagaatttataccaggactaaagaactattttctgttatgcaaacgtaatgctgacgcggtttttgtaaatcagtgtaaaaattgtgtatgcaaaatagttagaaaacttgtataatacgagttgtgggcgaaacgaatcaaaaaaatctctcgtgaattgttggataatttgaagaatttcgtcatgcggattactagcttttatagctacatattttaagggaggtcacacagcatgaagaaatcaagatggacgcttgtcctatctcttgtgcttgtattgagcgtattcctgtcggcttgcggcggcggctcaaacaacggggggaacagtggcggagaaggcgaaggagaaggcggttctgctgaacaagtacttaacttagtagaaacagctgaaattccttcaatggatacaacacaagctactgataacacatcttttaaagcaatgaaccaggttttcgaaggactttaccgtcttgacgaaaataacgagcctacacttggtatggctgccgaagaaccaaaagaagaagaaaaagacggtgaaactgtttacacattcacaattcgcgatgacgctaaatggtctgacggatctgatgtagtagcaggagatttcatctatgcatggcataaagcactaaacccagatacaatttctccttacgcttctatgtttggtactgcaggaatcaagaatggtaatgcgatcattactgaaggcgatcctctttacggtaaagtagaagagcttggagctaaagcagtagacgagaaaacacttgaaattactgtagaaaatcaagttccatatttcaaatcgttgcttactttcgcaactttctatccacaaccagaaggctatgctgaagagcaaggcgataaatttgctctagaagctgacactatgctttacaacggaccattcgttttctctgagtggaatcacggcgaaggctggacttttgagaaaaaccctgagtattgggatgctgaaactgtaagccttgaaaaagttacaactaaagttgtacaagatgttgcaacaacagttaacctttatgaaacaggcaagattgaccgcgcaggtctatcagctgactttgtagatcagttcaaggacaacgaagagttctcaactcttgtagatcctacaatgtacttcatgcgtctaaaccaggaaactgaagcactagcgaacaaagatatccgtaaagcactttatcttgcatatgaccgcgaaggacttgtaaatgttcttcttaacaacggatcaattgcagctaaatatttcgtgccaaaagactttgtaaaaggtccagaaggtgatgacttccgcgaattcgctccagacggcttctatgctgatcaaggtgaagaagaagcgaaaaaagcttgggaagctggacttgaagctctaggtacagattctgttgaactagaattccttacaactgataatgagcttgctgcgaaaattgcagaatatgcaaaagatcagtttgaaacaaagcttgacggtcttacacttacaatcaacaagcagccttggaagcaattcctagagcttgaagattcaggtgactttgatatctcaactggtggttggggacctgactatccagatccaatgacattcctttatatgtttgaaacagacggcgcatacaaccgcatgggttactcaagtgagaagtatgacgagttagtttcaggagctaagaaagaaacagatgaagctaagcgttggaaaatgatgcaagatgctgagaaggttctaatggaagaggacattgcaatcgttcctacttaccaaaaaggtaacgcaatccttcaaaaagattacgttaagaacttctatgttcactcctttggtgctgactcatcttacaaatggatcaagattgaaaaataattttagattttcaggagagtatatgtcatcctgacatatactctcttttttacctgtaataagaaatatgtcgaaaagtaagctagatgtgaaatagatagaaaatttattctagtgaaattccatttttcgacttataataaacaggcaggtatcttttgaggaggttggttgtagtgggacgttatattggcggaagaatcatatcaatgttgattaccttcctaattattgcttcgctaacattttttctaatgaagcttctccctggtacaccgtttaataaccaggataagctaactgaaacacaaattgttcaattgaatgataaatacggtttgaacgatccagttcccgtacagtacttcaattatatgaagaacttattatcaggtgacctcggtgtttccttccagcaggatggccgtgaagtatcaacaattattggtgaacgtattggaccatctgcttaccttggattacaatccttagtagttggaacgattattggtcttttccttggaatcattgcagcattaaaacacaattcattccttgattatggaacaatggttattgccgttcttggtatttccattccaaacttcgttatcgctggccttatgcaatattggtttggcgtaaagtggcagcttttaccggtagcttactgggatggcttcgcctatacgatcatgccaacagttgcaatagcttcgattgttgtggcaactatagctcgttttatgagaacggaaatgttagaagttcttggacaggactatattacaacagcgaaggcaaaaggcttaagtagcacagcggttgttattagacatacaatccgtaatgcttctatacctatcattaccattatgggaccactggttgtaggtctaatgacaggtactctcgtaattgagcaaatttttgttattccagggcttggtgaaaaattcgttaactcgatcttaacaaacgatttcccaattattatgggtacaacgcttttctttagtttactatttatagttgttattttattggtagatattatgtatggaattatcgatcctcgaattcgtctagcgggaggtaagggttaatgagtatgaaacaagaaaaactacacgatatctcagacgacatgtttcaacccgctgatattgattcattagaaaatgagcaaattgctcgtgaaagtacagggttttggaaagatgcttggcgcagattaactaaaaatcctggtgcgattactggtttgatcatcattatcgcgatcatattacttgcgatttttggaccaggaatgaatgaatactcatattctgagcaagagttaacgcgagctaagcttccagctaaggttcccgttctagagaatattgatttccttggcgtaaatggagtcgatattcgtggaaccgaccagtacgaagcgaaaggttatgaagacgaatacttctggtttggaacagatgagttcggtcgtgaccagtggacgcgtgtatggcagggaacgcgtatttctctctttatcgcggcagcagcagcgtttattgattttgtaattggagtagcttacggtggaatttccgcatattacggcggtcgagtggataattatctccagcgtattattgaagtgcttattggtataccaaacttaattttgattatcctctttatattaatatttgaacctggaatattctcgatcatccttgctctgtcagttacaggctggataggaatgtcgcggattgttcgaggacaagtcttaaagcttaaaacacaagagttcgtattggcttctcgtactttaggagctacaagcggacgggtaattgggaagcatttaattccaaacgtactcggacaaatcattattacaacgatgtttaccattccaagtgcaattttcttcgaggcgttcctaagctttatcggtctaggattacgtccgccagaagcatcactaggatccattatcaacaacggatttaagagtctacaaatttatccgcatcttgtgctatggccttccattatcatttcattgattatgattgcctttaaccttcttggtgacggccttcgagatgcatttgatccaaagctacgtaaataggggggaattagaatggaaaagattctagaagtgaacgatttgcacgtctcctttgatacgtttgctggagaggtacaggcagttcgtggagtaaacttccatttaaataaaggtgaaacattagctattgtaggagagtcaggatcaggtaaatccgttacatcgaaagcggttatgcgcttgattccaaaccctcctggacgtattaaagaaggtgagatcaagttcggcgatcgtgatcttgctcagctgtccgaaaaggaaatgcaaaaaattcgcggatctgaaatctcaatgattttccaggatccaatgacatcattgaacccaaccatgacggttggaaaacaaatcatggaagggctagtaaaacatcaaaacatgagtaagtctgaagcgaaggaacgtgcgatcgagcttttgaaactcgttggtattccaaacgcagagggaagagtgaatgagtttcctcaccaattctctggtggtatgagacagcgtgtggttatcgcgattgcccttgcatgtaatccacgtgttcttattgccgatgagccaacaacagcacttgatgtaacgattcaggcacaaattcttgaactattaaatgatcttcaagaaaaaatgggtacatcgattatctttattacgcacgaccttggtgttgtagcgaatattgcggatcgtgtagctgttatgtatgcaggtaaaatcgttgaaacaggaactgttgatgaaatcttctacaatcctcaacatccttacacatggggactgctcggttcgatgccaagtcttgattcaacggatgaagagctaattgcgattccaggttcacctccagatcttcttgatccacctaaaggcgatgcttttgcaccgcgtaatccttatgcgatgaagattgacacagagatggaaccacctttattcaagatttcagatacgcactatgccgctacatggctattgcacgaaaaggcacctaaagtagaaccgcctgcagcgattaaaaagcggatgcagggaatggctccaagcgagccgatcattggcgcgaaagatggtgggaagaatgtctagtcaagagaaactattagaaatcaaaaacttgaagcagcattttaaagtaggtaaaagtactgtaaaagctgttgacggattaacatttgatatttataaaggtgagacgttcggtcttgtaggagagtctggttgtgggaaatcgacaaccggacgtacgattattcgcctttacgatgcaacagatggtgaagttcgttttaatggtgaagatgttcatggaaagaagtctgcgaaagagcttaagaagtttaatcaaaaaatgcagatgattttccaggatccttatgcttcattaaatccgagaatgaccgtttctgatattattgcagaaggcatagatattcatggtcttgcaacatctaagaaagctcgtatggacaaagtggttgagcttcttgaaacagtaggattgaataaagagcatgcgaaccgctacccccacgaatttagtggtggacaaagacagcgtatcggaatcgctcgtgcccttgcagtagatccggagtttattattgccgacgagccaatttcagcactagatgtttcgattcaagcacaggtcgttaacttgatgaagaagctacagcgtgaaaaaggcctcacgtatttatttattgcccatgacctttcgatggtgaaatacatcagtgaccgtattggtgtcatgtatcgtggtcaaattgtagagcttgctgaaagtgaagagctttaccgtaacccgctacacccctatacgcagtcgctactttctgcgattccacttccggatccagaatatgagcgttcaagaaagcgtaaaatttatgatcctgaaaagcaccttccgaaaaatggggaagagcgtgtccttcgtgaagtaatggaaggccattggattgcttgtacagaagaagagtaccaaaagtatcaggtaacggtttaaaaccgttaaggaccgcatttcagctgaaatgcggtccttttatgattcttttttgtttttaaattttgttacaagataagcgatgtacatgataagtgttacgatcagaaatcctttaatataaagggataagtcagtgggcagcgaatagtctactaaaataaggccacatagaataaaagtggagacgagtaaattaaatttcaatttagacataagagctccttttggatgttgaagtatgaagttaagtaatagttaaacaagaaaggtgacttaaagggaggtattggatgaatttttacgcatttaaccctgactttgataacgaaacactagaatcaatcaggtctgaaaacgtcataagagtcgggattgaaccttcccctcattctacaatatacctttttgaatcaaaagatcaaacagttggttacgtatggatggaaagtttatcagagtacgttgaattattggagtttttttataaaggttcagaagaaaaaagatggggtctttatgattttgtggttaagttagcagaaaaacagagaaaaaaagcaattagaatgaaaacgccggctaatgaaatgggagagaaatttcttaaaaaatggggaggggtggtggtggaaagggatggaaggggaatgctcattgaaatccctttcctaagcgaatgggagtaaatctatacactttgttgccactcgttttgtttgtttaaactactttcaatcaaatcatccagtgcgttaagctcaactcttgcttcttcttcagacatcactttgtagtggtgtttgccaccaggctcttcatcagcttcatcggccatagcgacgacttcttgcaaagcattgcggttcacggtacccataaagtaagaatctgtatggaaaaggatcgcgacggcaatctctttggctgatacagggttctcaccgaggcgaataagcattttgtgtgctcgctcagctcctttaatcgcgtgaatatcattttgtttatataaattatagtcccattgtccattgcggtaccatgtatagtgaccaatatcgtgaagtaaagctgcttttgttgcaagatcaggattaacctcatgcttatttgcaaagtgataagcgtgtttggccacggtaatcgcatgagccagtccagcgcgctttaggtattttcgtgcaaatgggagttggaaaatatctgataaggttacgtttctcatgttaatggcctcctaactttcttgaatttatttttctaaacatcataccatttagaaaaaaataaatcaatcataagcgttcacgaaaaagacatgagaaattttactggaagttctttcaaagcctggatattagtcttataatagaggaggcaaactaataaaggggagagaagctgtgcgtatttttaaactagggttgaaaagcctgctcgcgtcggttttgctattttctgtgttcggacattctgtattagcagaagatgcacgatccgcgacaaatcttaaaggttttgaagtagaaaacaaagaattaacacttccagatcgtcttccgagatttgtttatgattctggactggattttaagtatccagacgcagtacgaggtatttatgtaacgggaaattcagctgggggaagtcggtttagtaagctcacggagttcgtgaattcaacagatctaaatgcaatggtcatcgatattaaagatgattttggaaaccttacatatgtaccaaagaaggactcaccattagcagagtatgagattggtaaaccttatatgaaagatccacgtagcgtactagaagaaatggagaaaaacgatatttatccaattgcgagagtagtagtttttaaggatactgttcttgcggaagcgagaccagaactttcctataaagagggcggttctgtttggaaaaatggacgcggagaagcatttgttaatccatttaaagaagaagtttgggattataacgtggaaattgcgattgaagcagctaaaatgggcttcaaagaaatacaatttgactacgttcgtttccctgaaggatttgaaacacgcgaagatacattagagtattcgatgggcaagtatgccgatttggatatggacaatgtccaaaaacgagttcaagctgtcactgattttgtggagtatgcaaattctaagcttgaacaatatgatgtcgatgtatcggttgatatttttggatactcagcgacgattcctgaagcaccgggaatcggacaaaacttctccaaaatttcaagtaatgtggatgtgatttcatccatgatctacccaagtcattggggatcttactttggcatcgctaagccagatcttgagccttacaacttagtgaacgaatatgcgaaggttgagaacgaagtgttaggtaagctagaagaagcacctacaagtcgtccttggatccaggatttcactgcaagctatcttggtagcggaaattatttaaactatggtaaagcggaagttgaagcacaaatcaaagctttgaatgacaatggtattaatgaattcctactatgggatgcgagtaatagctatacaaaaaacgtcgattatacaccatgatttcaagaaaagaccgccattggcggtcttttccaattagttaggatcattcgataattttttccagtttttttgactattatgaagtggtttctgaaaagtattctttttcttttggaaaaggagatgacctgaagcatttaaaaataccgcaatgaaagctgtgaaagtaataagtaccatggctaataaaagaaactcactaaaaaaattcatgtccttcctcctcatagctcattatagtattagtgtactaaatgtttacttatcaaagaagaggggaaaataacgattagcacgtctagcactatcttactggataaatgtgttatacttatagtgaagaattaattaaaagggagtagatcaatgaactggtatgagaagctgaagcaatatttccccattgaagagatgaaatcaaaagagcatatggacttgctattggaagaaaagggtgacatttacaataaggacgagggaccgcaccatgttctaatgtatgccgatcttcctgatttcatattcgtggactatattttcgtttccagggatgccagaggtcaggggctaggaaagaaattaattgaacaattgaaagaaaagcagaaaccaattatccttgaagttgagccagttgattatgaagaaacagatacggaaaaaagacagcgcttttatcttcgagaaggttttaaacatgcgaagtcaattggctatcgtagaagatctcttgctacgaacgagattaacgaaatggagatcttatactggtcaccgagtgaagctggtgagaaagaagtatacgaagcaatgaagcacacgtatcaagagattcacacatataaggataaacagctttatggtgaatcgtatcagccggtagaagaagtgttgagccttaaagaagagaaggaacttatcgaagaataagagaactgttttcgatcaggagggaaacttcttatgaagaatcgtgagaagaaaaagcaaaagaagcgcgaatggttgaaggatttattgaaaagacgctggaaaacctggaaaccgcagtcttcgaaagagcccgcctcaaatacgagaacatctgcttaacgctagtgattataaaaaccgaaagccaatgacggctttcggttttttctattgatccatttcaattttcttctctagccgcttttggcgacgaaggtcaattaggtaatacactactggaataaagacgagcgtaataaaagtggctacgcttaggccaaatacaatgacaatcgccataggctgttgaatttcggttccttctccaaatccaagcgatagtggtacaagaccaaggatcgttgttaaggccgtcatgaggattggtcttaaacgaataggtccagcttctaaaatagcttcccgcgtgttcattcctgtctcacgtagcttattaatataatcaacgaggacaatcgcgttatttacgacgatcccagttaagataagcattccgacgagcgaacctactccgagtggttggaaggagatgagcagcccaaaaataataccgatggcagttaatgggacagaaaacatgatgataaagggatagagaaatgattcaaattgtcctgccatcaccatataaactagaacaatagcaagagcaagtgctccagataatttaaagaaagcatcattcatttgttcatcttgaccaccaaaggtgattttataagaatttcctggtagcggaacgtctttaacaagcttctcgcgaatttcgtcggttactgttccaaggtctctacctaacaaactggctgtaatttcaacttgtcttagtcgatcagtacgtgtaatttccgaaggacctaaacctcgctcgatttcagctacagcggaaagagggactttttcgccagtttgtgtttcgataagcagactcgagagtgaatctagtgaatctgtatatttatcttcgactgcaaggcgaatgtcgagttgattcccgtctcgagcaagattactcgcaacaagtcccttcgttgcatttgaaatagctgttgaaatttgagaacttccgattccataacttgccgctttctcgcgatcaattagaatttgaacttcaggattatttgattcaatacttgaagttggttctcttacgccatcaacctctgaaatgcttttcattacatcatctgatagctctttaaggacatcaaggtctggtccaataatattaatcgaaattggatcagcactaaatccagagtcacttgcagatacagatatatcggcatttggaatatctttaagtttctttcgtatatcctctgctacttctaaatcggactggtcacgctcatcaatgggtacgagcagaacgctgtaagtagctcgattcgtttggcttcctgcaccaatgctaaagttgtcagaaccacctgctgttaaataagaaaggtcaacttcaggaatcgaatttaacacgttatcaatttcctcagtgacgttctcggttgcgtctaaagaacttcctgcaggcaaattagctgatatgtttacgaagctttgatcctgggcaggcagaaactccgtgccaataaaaggggttcctgctgcagaaatgactaatagcaagacggtaaaaccgaccgtctttttaggatgagataaggttttatctaatacccgtctgtaccaattgttcacacgatcgaattttagttggaaaatggattttgattcgtttcgattcattaatagtgaagaaagcaaaggtacaataatcagagctgtaaacagcgatgccaataaagaaaatgttacagcaagcgccagtggtttaaagagctgagcagcgagtccagtaacgaaaacgattggcaagaacacaacgacggttgtgagtgttgacgcaataatggcgctacctacttcttttgttccttctacagctgcttctttcagtgattttccttcttgtcttaatcgatagatattctcgagaatcacgatcgagttatcgaccatcattccaacgccgagcgccagtcctcccaatgtaagaaggttaatggtttgtccggaaaagtacattaaaataaatgcacctacgatcgagattggaatggagagaccaataatcaacgtgctgcgaatgtttcgtaaaaacagataaagcactgcagcagctaagaggcttcctataataatgttccatacaactgcacgaatggattgattaataaatttagcttgatcaaacaccgttttaatttccatgttttctggaagggaaggctggatttcctcaagcttttcattaacttgttttacgacttgaaccgtatttgcacctgattgcttttgaattgaaaagccaatcgcaggttcaccgtttaggaaactttcttgaacagcaggtttcatcatctcttcaatttcaacgagctgattgagctttaccgtaccattttctgttggaacggataggttctttaaatcatctacagaattaaactcgccagtcacacgaagcggtaagttcttattttcggtttcgatggagccgctcggtaggttaagattctctgagccaattagctgctgtaaatttgttagtgtaaccccatactgacttaatttatcgggatcagccgttaatcgaatttctttttcaagctgtccttcaatggtaactgcagcaactccaggaacggagtcgagtgatggtttaatttgatcttcaatcacttttttgacagcggtaaggtcttcttctgagccggcaacaccaagctgcataataggaatgtcacttggattaaaacgaagtactttcggaatcggaacttcagatggaagtgaatctctcactgcatcaatttgttcccgcatattaagggttgcaaaatccatgtcggtaccccactcaaatgaaacgaggattaacgctccgccattttgcgagacggaagaaatgctttcgacgtttggaagagtacccattacattttcaagaggggaggcgagtagattctcaacctcttcaggtccagcgccttcataagtaactgttaccgcagctactggaaatgttaaatctggaaaaaggtcgaccggcatgtttcgaagtgaaacggttccgatgatgagaatgaaaataatgaccatccccatggcaatggggcgaaacacagaaagcttagcaatattcatatggactcaactcacttctgtacctggatttcggatgcctcatttaagcggtcttttccttttgtaatcacttgatcaccttttgaaaggccgcttgtaatttggatgtttttatcagtttctgcaccaagttcaacattgatttgttttactttctcaccttgaggcacgtacacaaacgtttcttcttcaccatagatgatcgattcttttggcacaacgatggcattctcaattaggtcagtctgaatggtagcggtagctttcatgccgcctttgatttttagatctttattctcaagaggaatttcgattaggaatgagcctgtttgttcattagcggttggagggatcgcatttaattttccatcaaatgtgccttcaactccatcgaatgtaatcgctacatcttgatccttttttaactgagatatttgaaagctattcacctgaaatgtagctttgattggatttaaattaacgacgactgcaagaggcgtacttggaacggccgctgcattttcttccgcattaatctgagaaacaatgccattaataggtgattcaattgttgtcgcatttaagacatcctgtgcttgattcaaacttgcttttgtttcggatagctgtgtttctaattgtgtgacattaccagcagacattgaaggtacttgtgcagctgcttgtgatagctgtgcttgcttgattgtcacttcaagactttcttttaaaacatctgcagctgttacttcttcagaatctaactcacttagaagctctttagagcgctcgagagaatggtttaattctgattgaagatttttcagttcctgagcgcttttctcagcttgtcccgaaagctccttcgcttgattgacagccttctcgagttcgttcactgcattagtaagttgattaacattttctcttgcagatgaatcatctagagcagcaattaaatctcccttttcaactgtgcttccaaccgtcacgtttatctccgtcactttaagcggagaaggtgcagcaagagggatggttactccgggggtagcttgaccggataattcaaggtcatttgaaatatctttttgatcaaccgatgccacttctaccggtattggttcatttgcagtttcttgatttgtaatctcttccgttgtacaagcgcttgcaaagacaagcatactagcaaggaaaacagcctttttcatattattcacctcagaattagtgtatctcttacgaatcgtatcatgtgaagcaaacttttttatctgaaattcaaacatttttataacaatacaggtttggatagttggtgaaggggaatataggagttagacttaacattaaacaattgtatagctattgtatagcttttatgtaatttttgtcatcccctatttatttgataagaattgtagtataatacaaattgtgaaaagataatttttctaatgtggatttgacgtttacttatagaaaggagcaattccttatggtaacactctatacatctccaagctgcacatcttgccgaaaagcaaaagcgtggttgcaagagcatgatattccgtttacagaacgaaatattttttccgagcctttaacaatcgaagaagtgaaagaaattctacggatgacggaagacggaacagatgaaattatatcaactcgctctaaaacattccaggaattgaacttaaatcttgatacggtttcattacaggaattgtttgaactgattagcgagcatcccggattgcttcgccgtccgattattttggacgaaaaacgacttcaggttgggtataacgaagatgaaattcgtcgtttcctacctagaaaagttcgtacgtttcaacttcaagaggcacagcgtctcgttaattaataaaaaacttctacagcaatgcctgtagaagtttttttgttggaaaagttatttagttgattggatgtaaacgatattcccttttattttctttacgaaccagcctccaagaatgactataagaaggaaggcaacttgagtggcaatttcaaaggaagggtaagtatagaaaaacgtttttaattcagctgcgcttgttaacattttggcagatgtaaaggctaaaattccagcaccaatgtaaattagtatcggaaaatgatcaagggcatgcatgatcatgcgactgccccatacgataatagggatagagatcactaatccgaaaaccacaagcggtaatttcccttcagaagcacctgctattgcgagcacattatcgaggcccatgattaaatcagccactacaattgttcgaatcgctccccagaaagagaaagttgaatggatgttttcactgctctcactatcaatcacaagtttgaaggaaatgtagagaagaaagaggctaccgacaattaataagaaagggagcattaataaatagacagccactattgttagtgctattctaagtccaacggcaatagctgtacccatcataatggctttacttcgatgagagggagggagattacggcaggcgagagcaatcacaactgcgttatctccaccaagtacaatatcaattccgataatgaagaaaacctgagtaatggtttctaagttaaacaaggaatccactcccgagtagcgaattttttaatctcatgacaggagcacttttgggcaagctatacacataaataaatatatcgtgtatatggtgtaatatgagtgaaaaaatcaaacgattttttatttccattctttgatggtttatcatagaatggtattacaagagaaaagtggttaaattaagccgcttaagggaaagaggaaattaggagtatcccagagggaatagccttccggttaactaaacaggagggagagagtgcacatggaaatcgaacgcgtcaacgcgaatacattgaaattctttattacgtatagagacattgaaaatagaggattcgatcgagaagaaatttggtacgacagagaaagaggagaagaattgttctgggagatgatggatgaagctcatcaaagagaacagttttcactcgagggccctctctggattcaagttcaagctcttgaaaaaggacttgagatcattgtcactcgtgctcaaatgtcaaacgacggatcaaaacttgaactaccgatttcagaggaaaagcagcttgatcttccacttgatgagaacatggataaaattcttgatgataaatttgcccttcagaataactatgagccagaagacgagcctgaacctattgaaggagaagagctttcctttatgatcgcgtttagagattttgaagatgtcatttcattatcgcacggatttgatcctgttggagttgaaaatggtctataccattatgaggatcgttactatctccacgttgtctttgatgatacattgatagaagaagatcaagacaaccgtttaagtcagctgttggaatatggatatgagacagaattgacgattcaccgcatacaggaatacggtaaggagattctctctgaggaagctctagaacaactccgcggacacttcccactcttataaaatgatgccgatttccaatgggaatcggcctttttatatgtaatatccaaaatccagttgcgaaatgaagaaggaatatgggtcttcgaagcgaatagaggttaaggaacaattgagagagaggtgttgtgatgttaacagcccaaacgatgaatggaaatttgcttaatcttgcagatcggcaatatcgtctagatgaacttatccaattaaggcgttccacttcctatttttgtccaggatgtcgacagcctgtcgtcatgaaactaggtgagaagaggacctggcattttgctcatcaaggaactcacacgtgtgaaacccagtgggaacgtgagtcaaacgagcatctaactggaaagcttcagctctatgaatggttgaaaaaagattatcctaatgtggaagtggagtatttcttaaccaaaacaaatcagcgccccgatctatttctccctcattcgcaaacggcaattgaatatcaatgctcttctattgatgacaaacttcttacaaaacgaacgctttcttatgaatcagcaaacattcaagtccaatggatattaagtgcaaagcgcctgaaaagatcgtaccaatccatttatacgatgtcttcaatggattggtcagcagcttcccaccatcatcgtttaccaaccatttattattattgccccgtagaacgaaaattcgcgactgtccttcttcatcatagcttaactcctaccaaatttatttgttccacattgtatacctctgcattaatgacttcatacaaaccccttttcacaaaacttcctgattggaaagaacagctacattcctattccatttggctcaagcaaaagaagatttggcgccaaaacccccatggtgaaaggtcatatgcctttttttatctgcgtaaacgtttatatgctagcggtcattcaattcggctttttccctctgaagccggcattccctctgactataattactggattgaaacacccgcctatttgtggcaaacgtggatcctcatttgctaccttcctacgatacattcccacagtggttttacatttcagtcattgtttcatgcatttggacaagtcattcaatctggcttgattcgatcgagatattgtccagctcatattgatggtgttcgtgcggctcttcaaggttatgtaaagcaattagttcggttaaaagtgttaaaagaatgggataatgaacgatatgaaaagctttatcaaccgacgattcataatcatgtagaacagtgcttccattttgacaaattgatgcatacgaagcttatttagcttgcaaggtttgtcgagcgaaattgtaagcatcattaggagaatatggtacgataatgaatgagaggaaatcatttgatggaggtgtcgattcatggaagagaaaaaagtaaatgcactacctaaaagagatgaaattccagtagaagatacgtgggaattagaagcgatctatgaaaacgatcagcagtgggaagaggaatttaaagaaataaaagcgcttcttccagaaatgaaggaatataagggaaagcttgcagagtcagctgataagctatataacgctcttcaaaaacaagatgaaattacaattaaacttggtaagctttatacatacgctcatatgcgctatgaccaggatacaacgaattcgcaatatcaagggcttaatgaccgagcagctaatcttgcaacacaagttagcagtgagttggcgtttgttgtaccagaaattttaagcgtacctgaagagacgattaagcaatatttgagtgacaaggaagaattaaagctctatgagcacgcccttgatgaaattaaccgagagcggccacatgttctttcaaaggaagaagaagcgatcctagcaggtgtaagcgatgttacaagcagttctagtaatacgttcggtatgctaaacaatgcagatatgaagtttccaaccattaaagatgaaaatggcgaagaagtcgaagttacacacgggcgatacatccgttttcttgaaagtagcgatcgacgtgtaagaaaagatgcgtttaaagctgtttatgacacgtatggtaaatttaaaaatacgtttgcatcgactttaagtggcgcagtaaaaaaagataattattatgcaaaagtgagaaattacgattcagcaagacaggcagcgcttgatagtaataacattccggaagatgtttacgacaacctgatcgaaaccgtgcataaccgcttgaatttgctacatcgatatgtaaagttacgtaagaaagcgcttggacttgatgagcttcatatgtatgatatgtatacacctctcgtctctgaagtgaaaatggaagtttcttataacgaagcaaaagagtatatcgtaaaagggttagaaccacttggtgaagagtacaagaacatccttgaagaaggatttgccaatcgttgggtagatgttcaagagaacgttgggaagagaagtggagcttactcttctggaacttacggtacgcgtccttatattttgatgaactggcaagataatgtaaataatctctttacgcttgctcacgagtttggtcactcggttcatagttattatacgagagaaaaccagccatacccgtatgcgaactattcaatttttgtagcggaagtagcttccacaacgaatgaatcattgttaaatcattatttacttgaaaatacttcagataaaaaagaaaagctttacttattgaatcactatttagaaggatttagaggaacggtgtttagacaaacaatgtttgctgagtttgagcatatgattcataagaaagcacaggacggtgagccgctaacgcctgatttactttcatctctttactatgatttaaacaagaagtattttggggaagatcttgtgattgatgacgagattgctcttgaatgggcgagaattcctcatttctattacaactattatgtattccaatatgccacaggatttagtgcagcagcgtcactctcaaatcaaattcttgaagaaggggacgaggctgtctcaagatatattgatttcttgaaagcaggtagctcggactatccaattgaggtactaaagaaagctggcgtggatatgacttcatctaagccaatcagtgatgcgttggacgtatttgaatccattctaaacgaaatggaaaacttgttgttcgaagcctaattaaaagaccttctccactttggagaaggtctttcttagcgattaaagcctctaaattgattgcgagaattgaacatgctaacagtaaagagaattgaagcaaataaaagtgctgctccgattggtaccggaatgaattttagtagtcccataagaaacatcacaaagctgatcacaatgaaggcaatgccaattaatagatagaagcgcattattttccctcctcgacctatacgtatgaaatatttgcatacttataaccgtcagtaaaaagccaaaaaaatagccccacttgtgggaccattctttttccttatccattttttacagttcgccagaaagagccgtgtttggcaggaactttctcaactttctgttttagtgctagcttcttcatcgctgcgtcagcttcttcacagctcatgtcatacacgactgcgacttcttttgtcgctacaaattgatacagatccataaaagcatctaaagacgggagcggttctggcgttggctttgtcttcaacatttcggtcaggatccgaacatatacttcatattcataaaggcccgtaatctttagtccttcttcttcaatattttcattgaaaaagacaagcgtaggtagttcatttacttccatttcagatgagattttcaaatcacattgaaaagcttttacagctgcttgagaatgaaggtctttttggaattcgtgaacgtcaaggcccgtttctttcgcagcttgtatgagattttcttccttcgtcatattttgcttctgtataaagagtaattctctcatcttacgaaggaagttaaacccgggtagctttccctgaagctctgcagccttaatggcgatcgatgcgatataaggggtgtccatagggtcctcataccataaatcgccgtcacaggacatgccagaacggcttgcggtccgttcccatctttcggctacatcagcatgtgttgtgatgccttcattttttcttttaaaagagttaaatgttttaatgtttcctccaactaaatgtcggatacggaacgtatgtccatattcaagttgtagtttcttaatcattggttcaagaccccagcagtcaggacagagcggatctataaatgaataaatttcgatcggtttgcccttttgagtctgggctgaacatgctacatcggattgtccatttggattgtaagaatcgcaataggaaccagttacattcggtgtcaattcgattctcctttctcttcctgatcacccgagttaaccatgtgatgggcagtgaacgttaatcgcgttaatagatgttcttttaaatcttcatcgagttgtacctcatccatcgcttcttgcatgcatgaaagccatgccgttgctcgtcttggtgtaatttcaaatgggagatgtctcgctcttaacataggatgcccatgttcttgtgaatatagcggaggacctccaagaaattgagttaggaattgggtttgttttcgagctgtttcagttaaatcttctggaaagattggttttaattcaggatgcagagcaacccggttataaaaagcagtcacaagctgttctagctttgcaccgccgatatgatcatacatgttttgcttcataatgattttcccctttggcaggtagaaccttatttcaatttcattttagcaacctccctacataacagcaaataatccgatttgaaatcattgccatacaaaaaaaacaggccgtttaggcctgttcttgggaggcaagaaagaagcgtaagatcttgtttttcgcctctcgctttggtatctcatgcttctgaaggaggtgactaaaagcacgttccccggcttcaaaagcgctaacttcaaattcgagttcaaaatcttctcggttaaggtattcgctatgatcaagaacgaggagtccttcatctagcatgtattccgcacgatgtgttgttaaacgacctaaatggataagctgatcctgaataccgaactcttgaagttgagttaagacttctccttctggtaaagaagcacttttcttaatagcttcaaaggtttcaaatgaaattggctgatgtgtttcaagcaatccttcatctgcaggttgctttaatgttaagacaaacttatcttttttattgcgaacgcgtaatgcagctcctttttctcgaatcagaaaatcagctgtatcaaaataatcattcgtttgtgtttttatgtcactttctaacttataagcagtaagcaaagaagtgtattcttctttcgttagcatatttttaaattcaatttctagttcctgtgccaagtgcgagtcctcctgtttagttggatataaaagaattatggcatatgtcttgaaacagaacaacaacggtgaaataccccaatgcattatgataaactattaggtgatacataatggaaagattgagaggagaggtatttgtgccagaacaatactacattataacaggggagctaaccgatcacacacttacctttggtttgaatgaaaaagttgatctaagcctctacacagcgacaggcaatatgctagtggattcagattccttatcgtttgtttatttacttgacgggggagaagggtatacatacgttcgattccaggaagaagtttggccgatgttagcaaatgttcttgaacaggacgtgaacgttactgttacttctgaacaaggttcatcgttagaacttgtcgatctaaaagaggaacttggctacctcattgagaatattaaaggtaattcgaactatggagaagacatgaatcaagctgttgagaaagtatttctaacagcttcgtaatagatatcgtcgttggtggtggttggatgaaaaattgggaagaatttttagccccttataagcaagcagtaaacgagctaaagataaagttaaaaggtctccgtgagcagtttgaaaaagccgatgatcactctcctgttgaatttgtaacggggcgagtgaagcccatttcgagcattcttgataaggcaaaaaacaagaagatttctctcgaccggttgcaagaggagatgcatgacattgctggggtgcgggtcatgtgtcagtttgtggaggatattaataaggtcatacatcaccttcgtggaagaaaagacttcgatatcattgaagaacgtgactatgtgacgaatcaaaaagtaagtggctaccgttcttatcatgtggttgtacaatatccggttcaaacaattcaaggtgaacaaatgcttcttgtcgaaattcagatacgcacattagcaatgaatttctgggcaacaattgagcattcgcttaattataaatacaacaagaagattcctgaagatgtcaaaaaacgtcttcagcgtgctgcagaagcggcatctaaattagatgatgaaatgtctgaaatacgcggtgaaatcaaggaagctcaaaaagtatttatgcaaaaaaaagaaaatgaacaaaagaaagctgaaaattaaagtagacgaggtgcctatagtgaaatttgcggtaaagtccaaaggggatcaaacctccaaccaacttcagcagcggattaaaaattatttacgtgattttgatctagactatgatgaagcagaaccagatattgtgatttctgttggcggggatggaacgctattacatgcgtttcatcactatcaggaccgactggcagatacagcgtttgttggtgttcatacagggcatctcggattttacgctgactggacgcctgaagaagtcgaaaagcttgtgattcatatcgcaagaacgccttttcaaattgtggaatacccattgcttgaagtaacggttcgatatttgaatagctctaaagaaaatcgttaccttgcccttaatgaatgtacagtgaaaagtgtggaaggttctctcgtcatgaatgtggaaattaaaggtgatttattcgaaacgtttcgtggtgatgggctctgcatttccactccttctggaagcaccgcttataacaaagcattaggaggagcgattattcatccagcgcttccttcgattcagctttctgaaatggcttccattaataatcgcgtctttcgtacagtggggtcgccactagtgcttccgcaacatcatacgtgtcttttaagacctgttaacgacgctgattttcaaattacaatcgatcatctttttttacttcaaaaagatgtaaagtcgattcaatatcgagtggctgaagagaaagttcgattcgcccgtttcagaccgtttccattttggaaaagggtaaaagaatcttttgtagatgaagtatattaagaggagacagtactgttcaattttggacagtgctttctttttgctaaagtagtgatgaggtgaactttattggaagtgaaaatgaactggacggttttagatcaagaagcaggcatgatgctaagagaatttcttttaagagaaaagaacatatctcgaagtatgttaacggatatcaagttcaaaggggggcaacttttggtgaatgggacccaccaaaatgtgagaactattttaaaagagggtgatgtcgttgaagtggtttttccggaagaacaagtaagcgaaacgatgtacccgcgacaaatgccattaaggatttgttatgaagatgatcactttttgctgattaataagcaagcaaatctcccaacaatcccttctcgccattcgacagcatcccttgcggagggcgttttgcattattataaaacaagcaacttaaacagaactattcacgcggtcaatcgccttgatcgtgatacgtcaggtctcgttctctttgcaaaacatcgttatgctcatgatctactttcaagacagcagaaaaataaagaaatgaaacgatcttatcttgcgttagtacatggtgagctcgaagaagatggagaagtagaagccccaataggaaggaaggatgatagtattattgaaagatcagtgcgatcagatggtcagtacgctttaaccaggtatcatacagtgaagcgatacaacggtttctctcttctccaactattcttacaaacagggcgtacacaccaaattagagtgcatatggctcatttaggacatcctcttctaggtgatgatctttatggggggaagaaagatcttatttcaaggcaagcactgcatagtgcccagcttgagttttaccatcctttcctacaaaaaaagctccgatttgaagcggagcttgaagaggatatgagcgttcttattgaaacgaagtgaacttctctgcaacataaggcatggatgattgaaccgacgttgttttcagttccggatagctaagtgctgttaatttgccaccaaatacgcagccggtatcaatgttcacagtatgattgacccaccttggttctaaaacaggggtgtggccatagacaatgagtgcaccaccttcatattgagttgcccagtctttccgaataggcatcccgtttggatgggattcgcctgttatgtcgccataaagtacaaaggtttttacttttttcccaacttgtccaatgtatttctctggtataccagcatgtgcagcaattaattctccatcatcaagagacaaataaagcggggcattctcatatagcgcaataaacaattcttttatcatcgtacggtctttaggtggtaacgcattaagttcggccaccgttgtctcaagaccgtgggtttgctgcacgttcctgccaatcaagtagcgatagaatttgttacaatgatttccagggcaatagaatgcctgtccacttgtcacgagttgagaaacgatttttacaaccgctagagagtcgttccctcgatctgtgatatcgccagggaaaacaagttttctcccttcaggatgaaggggcacgccacttttccagtcatatccaagacgcatcgtgagcgtcttcaattcattatagcaaccgtgtatatcactgattatgtcgaacacttcatttccctccttctatcttctatcttttccctaaaggtagaacaagtatcatcgtaaattcaacttccaaataaaaataacctgccggcttggcaggttattcaaacatatacgtttttgttcgtgagcgaacgtttaagacaagcccaactgcaatcatataggttagaagggcacttcctccgtagcttacaaaaggtaaaggaattcccgtgatcggtaggattcgaatcgtcattccaatgttttgaaatacctggaaagtaagcattccgataacaccagcacaaaggtagcttccaaatgattcattgctttcaagagcggtatgaatcattcgataaatgagcatgaagaaaatcgaaatcgtaatacttgcaccaatgaaaccaaattcttctccgataacggcaaaaataaagtcagtgtgtgcttcaggaaagtaaactgtaccatcagcgtaaccttttccttcaagtttacccgacccaattgctagaatcgctttcgtagcttgatagccagcgtccgtgtactcttctggagcaagccagccgtagaatcgggctagttgatactcatcaagtaagtaagctttaaagaatgcgggaaacttgaagaaaataaagacgaaagtagcaatacccgctacgcctattaaacttaaaagagaaagaagtctccaacgtacacctgatactagcgtgatgctaacaacgattgctgtaaataccatcgctgtaccaaggtcaggctgagccataacaataagcagaggagcggcagcaataccgaagatcttcgctaaaagaattagatctgtctgaatggttttcgttggatgtttttcatgatgcgagacagaagctgaagcaatggcaataattaagaaaatcttcataaactcagatggctgaatacttccgagaccaggaagaacgaaccagcttttggcgccatttcgaattggcgcaatttggtaacttccaatatattcaggacttactgctagtaagattagaagaagaattccaaatccgtagagataccaggaaagctgcctaaagcgatcaaaatcaatgatcagtgtgagcgaaagtacgaaagcacctacgaaataccatgtaagctgtcttcctgcaaagttaaagttttttaattctccgggtaatgaagcctgcgcgctgtaaatggcaacagtactgatacacataagaagaaatacaaagaacaaaagtgtgaaatctatttgttgccatggtgtttgattgtcattgttcatgatataatcctttctaaagaaaagcgttccttcttttaatcacatttcctatcttatctgaaatccttccgtttgcaaatcggttcctgtatttatttttgacaaaataactacacaccgactaagataggaaggtaattttactttcattgcgtaatcgattaagggagcagtacctaagcaaagcttatcgaagttttacaataaatgatatagccatatttgaacatttgtaactttgttataaaaaacaacagggaggtgtgcagagtggcttaccaggagcaagagacgcaggctttatacgacgcactcatacatcacttagatcaagaagaaatagacgcatttcgtgagctatttctcgacattcacccatacgaacaatcgcagttcttcttaacggtttcagaacaaattaggctactcgtgtacacctatttatcaccacgagaaatggcagagatatttcagaatttcgatattgaagaacaagaagaatacatttcagagatggagccggcttatgcggcgaagatgcttgctgagatgtacgccgatgatgcagttgacgtattaaatgagttaaatccagaacaaattgcaagctacttaaccatcatggatgatgatgcagcggatgaaattaaagagctgcttcactatgaagaaaaaacagccggtagtattatgactacggaatttgtatcaattcgcgcgcaccaaacggtaaagcgagcgatgcaaatcttaaggcaggaagcgccagaagcagaaacgatctactatatcttcgtattagatgaacaaaaaaggctcgtcggcgttatttctttgcgagatttaattattgcagaagaaaatacgttaattgaagaaatcatgaatgaacgagttgtttcaatttcggttggcgaagatcaggaagaagccgccagaattatgcgagattatgactttctagctcttccggttcttgattttcaaaaccatttactggggattattacacacgatgatatcgttgatgttattgaagaagaagcatcagaagattattcaaagcttgcggctatttcagatgatggttcatttgatcgcaatccgttttcttcagcaaaaaagagacttccctggctgattatcctcctgtttctcgggatgatgacagcgagtttaattggtcaatttgaagtaacgctcgataaggtgccacttctcgcggtctttatccctcttattgccggaatggcagggaatacggggacgcaggcccttgcagttgttgttaggggacttgcgacaggagattttgaagagaatagtaagtggaccttaattgtgcgagaagcaggaactggtctcattacgggcgcaacttctggtgttcttgtaacgattattatttttttgtggaaaggaacctttttacttggcttattggttggcttttcgttattatttacgttgattgtcgcaacactcgctggtgcacttgtcccattattaatgcataagcttaacatagaccctgctgttgcttcagggccattcatcacgactattaacgacattatcagtatacttatttattttggaatggcgactgcatttatgagccagcttgtttagcgcttaaatgcagacgtttgaaggaggaaagaaatggaacacggtgcatccgtatcatcacttgttatcgtagttgttatcgcatttgttataccgtttatcttacaccgcttcagactgaatttcttgccggtcgtagttgctgagattattgctgggatcttcattggccaaagtgggtttaatttagttcagggagatacgtggcttgatacgttatcaacgctaggatttatttttctcatgtttttaagcggtcttgaaattgattttacggtttttgcgaataaaaagaaaaaaattaagcttccgagcggtaagtttgaaccaaaccgtgttcttgtgtcgttcattgtctttgttcttgtgttcgttgtatcctatctcctttcattactgtttgttgttcttggatacaccgacaatgcgttctttatgacgctgattatctccaccatttcgcttggtgttgttgtgccgacattgaaggatgcaaatattatgaaaagcagtattgggcaaacgattcttcttattgccgttattgcggatcttgcaacgatgattctacttgcaatcttcgtttcgcttaattcaggtggagaagggaatatgtggcttctgctcattctctttggagctgggattctgctttatttcctgggggcttactttagacatctttcctttattgaaacgatgtcaaaagggacgattcaaatcggcacgagagccgtatttacgttaattattgtattggtagggatttctgaaaccgttggtgctgaaaacattttaggtgcattccttgcaggggcacttgtttcgttactctctccaaatactgagcttgtccaaaagcttgattcatttggatatggttttctaatcccgatctttttcgttatggttggggtggagttagatatttggtctctattccaggatccgaaagtcttaattttaattccacttctattaatcgcgctttttgcttcaaagcttgtgccagtagtcgttttaaggaaatggtatgatacaaaaacggtgcttggttcaggaatgctgctcacatcaacactttctctcgtgattgcggccgcagaaattggtgagcgcattaatatcattgatgatcaactgtcatctgcattaattttggttgcgattattagctgtatactagcaccaattctcttcaagaaattaatgccgaaaccagaagaaagttcacatgcaaagaagcttgcgattattggggcgaaccaaattactttaccgatctcgcttgaacttaatcctgcgaattatgaaacatccatttatcatacgaagcaggaaaaagtggattctgagaagcaaagtagtcactttaaagttattgaactttccgattatagtattgatacgttaaagaacagttcagtgtttgatgccgacattcttcttatttcttcaggagatgatgagacgaattcagacattgcggtattcgcgaaagaatatggaacagagcgtgtgattgcacgaattgagcttactgaaatagcggatcagctacgagagcttaatattgatgtgttttctgtgttcttctccacaaaagcgctgctaaaagcgcttatagaatcaccaggtgttgtgaatatcttcactcgtgaagaaaatgcgctttatcaaattaacatgaacaatgtagaatacaatggcgttccactgcgtagcttcccgtatctcggggatacgatcatcgttcgtatttttcgcggcaaagattcgattgtgccacacggtgatacggaacttcgaatcggcgatcgcttaatcgtaacaggaagcagtgagagtgtcgacgaagtgcgctcactgttaagctactagtcctaacccctttctcatcatgagagaggggtttttatgtttttaaggatagggaataaatgtatgggacaaggtgatactttttataataggcgaatagaaggaggagaagagaatgaatactgaaattccaaaaataatttgtcccgtttgtggaagaaccaacgagatggagaaatcgataacggctcagtcaaatcagaacatcatttttgaatgtcccgcatgtggatatgagagacgaaatattcaaacaagtaaagggtgaaaaatcctcatggtgtatgttcattaaaccatgttatacttaggacgtggtgctaataactaataataaattcgaggaggagcatggatatgaacctgtctcttgagaaccgtacatatgttgtgatgggcgttgcaaacaaacgaagcattgcctgggggattgcacaggcattaagcagtgccggtgcacgattaatctttacttacgcaggtgagcgtctagagaaaaacgttcgcgaccttgcaggtacactagatcgtgatgattccgttattttaccgtgtgatattacaaatgatgaggaaattgaagctacatttgctcaaattaaagaagaagtcggcgtgattcacggacttgctcactgtatcgcatttgcgaaaacagaagaactaaaaggggagtaccttgaaacaacgcgtgaaggattcttgctagcgcataacattagctcttattccctaactgctgtatcaaaagcagctcgtccacttatgactgaaggtggaagcatccttacgatgacataccttggtggcgagcgtgttgtgaacaactataacgtgatgggtgtcgcaaaagcatcgcttgatgcaagtgtgaagtaccttgcgaatgaccttgggaaagataacatccgtgttaacgcgatttcagctgggccgattcgtacgcttgcagcaaaaggaattggcgactttaattctgtgattaaagaaattgaagagaaatctccaatgcgtcgcacggtaacgaaggaagacgtaggaaacacagcattattcttaatgagtgatctttctggtggaattactggtgagatgattcatgtggatagcggatataatattattgcgacttgatagtaaaaaccacgacgatggcgtcgtggtttttattttggaaattcatgtagctttggagagggacttccttcgctatcttcgataagttaaaggacggggacggtgcaatcttttacagtaagatatgttttcctgttccttatcacggcgttttctgtgtggagaaattgcttgatcgttcatcaaacaatggaaacgatccaacatttcgtctaattcgttctcactaagcccaccaactgctccagatcctaagaggattgcaaaagcaacgggcatcgtatcaacgatcacatcaacgtctacgtcagaattcccactatttttaataagtgccaatagttcttgagctttttctgatttcctactcatcttgtaacctccttatatgaagatgaataggatactagcatagagctagtatcctattttgattaaactagcattaccattttttacgatcgtggccgttgtcttcattgtcttcttctagctcttctgcaccagcaactgcagtagcttcagaatcttcggcagcagctgcagcagctgctgaagcattaacgttaacgtttacttcagagtttccgctattgataattcttgcagaggcgatatctttgctgttgtcttctttctcgatgtcaaactcgattggtcgaagttcgctcccaccattaccattttcactagcacctgcaacattacgacgaacacgacgacgagcaccttgagtatcatttttatatcccattatttttcctcctttcaaggtataccttatgatatacggattttactttttagagacggcgaatggtacaggcaattcgcataattttcatgaataaaaattgtttgattaataatttagtttttatgaaataagatgcttcagtttgtcttgggtatatgatcgtgaaaaattgattcactgccttattgctgaactttttctcaatctagacagttaaaaaacatttaagaacataggagaggattctggcattaagctgagatatctttttaaatgaccactgataccatcttgtgttgtaatagtctctgaagactctctggactactctgaggaagaaacactattttttatcgatgttatcttttatgtgaccaaagaaagattccatcaacgaggttgatctttaaaaaacgcgatacattcgaaaacatctatttaatcaattgatccattttttatagcttataaataggcttttcgtcagttcctacgaaagatatgtaatatcagtctgaagtgatttttgggacctccctggtcaattggacgctttatcgtcatgtaaaatccattttatagaagagtttgataaggtccttttctgtcaagattcaaaaccccgaaaaatgatgcactctttaaaagtgcccaatatccggggagttcaagtagccgtttttttaaataactatgttaatgaacgatgttgattaatgttgtcaatcgagtgagacaataattaagaaatcaacatgattaatttaataaaacctaaaataaaataaacaccacttacaattataagtggaagctcatcttatccatttaacctattttgagaaagtaaaaatgttagcaagagtagtagcttttaagagcgcccaacccctaagtaattcaaccccgcattgtttatagttgttggttctaaaaagtttctaccatcaaagatggtccgtcccttcatattcatctttactcgtgaccaattagctaatcggaaaacttcccaatctgttgcaactactaaagcgtctgaatttattgttgcattgtacatgttatcagcttcctctatctttaataacaaattatttatttttgccttaggatcatatccgataactttacaacctttttcaatcaacttttgacagagtttaatagattgggattcccgtaaatcatcagtttctggtttaaaagaaagtccccatactgtggtttgtttacccttaagtccatttaattcctgttcaagcttatcaatatagtaatcaacttgttgttcattaacttttttgacagcatttaatagatttatgctaatttgctttcgtttagcagcatgtgcaagtgcattgagatctttaggcaaacatgatccgccatatccaagtccaggttgcagaaaataagggccaattcgagcatccaaacccaaggacgctgcaacgtcagtaatatctacatcgtatttgtcacaaataagtgaaaactcgttaataaatgagattttggttgctaggaaagcattagatgcatatttcatcagttctgcacctgtaagactggtttcaataaatggagcatttattttttcataaatcttttttgaaattttgattgctctaggtgagtttgacccaataacaattttatctggatgaagtgaatcataaacagcagacccttcacgtaaaaattcaggatttgaaactatgtcaaacaatttatgatcgactccactacttatcaagaattgttgtagatattcattggtgccaggaggaacagtactttttgtaataattgttttatgcgtttttaagtttagagaaatttccttatatacagatttaattgcttcaagatctgtgtcaccatttttttgcgatggcgtaccaacagcgacaataagaataggggtattttgaatacaagattctctgtcctcagaaaaaaacaatctgccactttggcgacttttgtttagcaatttttctaatccaggttcatggataggtgtttttccattattaagatatttgatcttattaatgtctttatcaatacaatatataacgtgaccaatttcagttagcaaggctgcagttgctaagcctacataacccgcgccaataatacatatgtccattccattttaccctcctatttccaacaaactaattaaagtataaacttcaattcttctaatattgtattaggtaataggttattggtgtgaagaaaataaatagaaaaaatgggcagtgtactcaagtttccagtcttaccgaaatttataaacctctttttttgtttgacaagttactgtgttatttaaatcgaataggttaaaagtaaataatcttagaaggtgaagtcatatgattaagaaagcggtaattcccgcagcagggtatggaaccagaagcttgccgattacaaaagtgatacccaaagaaatgtttccaattggtggaaaaccagctatacattatgtagtcgaagaagccgtcgcctctggaatagaagaaatccttatcgtgatttcaagaacgaaaaatctaataatggattattttgaccattctcttgaattagaagcatttctggaaagagtaaataagacgtatttacttgagaagactactgttcccgacgttcatatacaatatgtgcgtcaatcgcatgcaaaagggcttggtgatgcgctcaaaattgcagaaccatttactggatgtgatccatttgctgtgttgttaccagatgatatttatgttggaaaaccagcgttagcagagttaatagaaatctttgactctaacaatgaaaatgtaatttctgtaaaacaattgcaaaatgaaatgttgaaagattatggagttattaatggcgagttagtttcggaaggtctttatcgtttaaaagagattgtagaaaaacccacgatttcaccaccttcaaactatgctgtaactggaagatatgtatttaactccgggatttatcagcatttgagtgaggttttgccagattttggtggagaaattcaattaacagatgcaattcagctaatgttgaaagaagaagtgttttttgctaaagaatgtactggagatcggtatgacattggtaaggagcaggattatataaggttactaaacagataaatgatttgtactcatcaatggtcatccttagcaactaatgacttctttctatgtctgactaaaaatattatccgaattggagtgctgaatggtgaagtattataagaaggcatacaaaaaagtaagtggttttaatgagccaatttgttacagaaagaactcaactgatttaagttctttaaagtatgttttttatgataaagagtatttgctaaaaccactatcatttgaacctaaatggattatagatggaggtgctaacgctggttatactagtatttattttgctaataattatcctaatgcacaaatcgttgcaattgaacctgatcaatcgaattacgaagtacttacagaaaatacaaaaaattataaaaacattgttccaatccattcgggactatggagtaaaaatacttatttagaagtagttgacgtgggacttggtgaatggggattagttgtaagggagtcagagcaatcaaaaccacaatccataaaggcagtgacaattgactcattaatggataaatataaaatgcaaagaatagatttattaaagttgaacgttgaaggtgcagaaaaagaattatttactaatgaaggacacaaaagttggttaaacaagatcaatatactcattatcgaattacacgaccgaataataccggggtgcacggaagcttttaatgaagcagtgaaaccctataactttaactcatttaaaagaggcagtaatctcatcttatataaggaaggcagttttaaatgaggttcaaacatataataaatgtaaaaattagcagaatgaaatttctttgtgaatgtgggggtttaaagtgattgaaacaggaaaacaacgaatccttattatcgctcctcatgcggatgatgaaattcttgggtgtgggggactgattgaaaaagcatgtagattcaagaatcaagtaaaagtcgtaattggtgcaatcggtgatattcgctttgaacataatatcaaagaaatagtcaccgctagaacgcgagaaaatgagttgaaaaatgcactaagtttattaggatgcacagaatacgacatattgtatcgatcgcatgagagctttctagatactatacccatgaatgaaatagtgacaaagctagataccataatgaatggttttcaaccaaccatggtctttataccatatcccagctttcatcaggatcaccaagtgttatttagagcatgtatgtctgctttaaggccagcacctaataaatcatatcaactaatcgcgatgtttgaatatcccttgatggtatggcaatatccaaagattaatgaatcaggagaattgtatttagatatatcaaaatcgatagatatgaaaattcatgcacttaataagcatacttctcagattagggaagaaagtcacttaatttctccagaaagtgtgaaaaaatgggcggaaaaacgaggtatggagacgggatgcaattatgctgaaaaatattatattttaaagatgtttctactttaatgattggctcagggggtatgatatgaatattttggttacaggaggagccgggtttattgggtcccatgtcgtcgatcttttaattgaaagaggttatcgtgttattgtagttgatgatttgtgtagaggtcaaaaaaataacgtagatagatccgcaatattttatgaaatatcgctaaattcaactaatttaggaaagatatttgaaaaagaaagacctgaatacgttattcatttagcatcacaagttagcgtatctgattctgtcaagtcacctttagaagatgcatcgataaatatattaggaacaatccatctcctggatttatgtattacacacaaagtgaaaaaaataatctatacatcaactgcagctgtatataaggaaaatcttagcgatataccattattagaaacgtcagatctcaagccgtcttctttctacggagtatcaaagttagtcgccgaagaatatatcaggttttatgagaagttttacgatctaccatatactatacttcgtttatcaaatgtttacggtccacgtcaaaatcccacaggtgaaagtggggtagtttcagtatttattgataacctgattaactctataactcctattgtatatggagatgggactcaaagaagagacttcatttatgttaaagacgtggctgaagcaatttttaaatcacttaatctaggggaaaacgaagtatttaacatttctagtaatactgatacaagtataaacgaactgtattctattttaaaagctaaattcaaccatttttatgaaccagattatatgcctgcaaaacaaggagatatacgatttagcagattagacaataggaaagctctgtctaaattaaaatggagtttaattcgtgatttagacaatggattaacagatacagtctattactttaaaaagggaaggggaaatgaatatggataggaactactcattagcaccattgagcaaagaatttggttttgatctaggtacaccagttgatcggtattatatagagaattttttagaattaaataagaaatatatttatggatcagtattagaagtcggtgatgcagaatatacaaagcgttatggaacaaatgtaaaaaaaagtgaagtactgaatttaattgactcgccagctgctacaatagtagggaatttagagacgggagaaaatataccggttggagtattcgattgtattattttaacccaggtactccatgttatctatgatatcagatctgcgctttctaacacttataatgcattaaagcctggtggaacgttattgttaacaacaacaggattaagtcaaagttgtgaatcgagttttcatggggattattggaggtttacgaacttatctttaaacaaattattaaaagaagttatcccttctacgcatatactctccgtaaaaaattatgggaatttagccctggcaaaagccctattagatggatgtcctaaagaacaacttcctccgacgttatttaattatgtagaccccaattatcaacttgttttaacagcattaatcaaaaagtaataagggaggattatgatgaataatgaatgcatggtaactgttctaacagcatcctataatcctggagtttttttggaaaaagctgttgaaagtgtctcttctcaatctattagaaattggaagcatgtaatcgtagacgacgcttctacggacgacagtttattaaatattgaggactatttaaatgattcaagagttactttactaaaaaatgaagaaaatataggtcagtcaaaatcccagaataagggactagaggtaattgatacgccatatattctaatgttagatagtgacgattggttgtatccaagtacgctagaattattgctacgtactgcaaaaaccatgtccgatgatgtagcgttaatatgtggaaataaaaccgttcattatcagactaaagaaggtataacatttggaaaatataaaagaacaggtgggagattgttcgataacaaatatgattttctacttgaaaactatgtaccatatcctcgtttttacaaaacctcagcattaaaagaaattggaggatggccaacagatgatcctcatgaagggagatatgtagaggatagaaggattgacgttcgattgattgaaaaatacaaaatactttggattgatgaacttttatataattatagaaaacatgaaagtaatttaactacaaacttgcatgtaatgaatgaaatgattgaatggaatattagagatgcgttaaaaagatggggagatatctatgatccaattttcacagttgtgaatggatggaaaactttagccgagttaaaacctaaataacttttgaaaaaccttaagtaatatttaatttttttatttttttgaattcggaaggtggaggatgatatgaaaaaggatgtaacagtattaattccatcttttaatccaggttactacttagcgcaggctatagaaagtgtatttcaacaaacatatcaatcctggcaggttgttattgtagatgatggttcaaatgataacagcctttttacaataaagcattatttaatggatccaagagtaatcttaataaagatgaagaagaattacggtcaatcaaaagcacaaaatgctggtttgaaaatgattaatacaccatatactttaaagcttgatgctgatgattggctatttccaaactccttagaggtgcttttgcaagaagtccagaatgtttcaaataaagtagcgttaatatgtggaaataaaaccgatgtgtattgtgatgaaaatgggaacaaattaattgaagttccaaggagagaggcctttacctttgaaaacccttaccaattcttactatcgaattttgtcccattccctcgtctttaccggacgaaagtcctgaaggagttagggggatggccaacagatgatccatggcaagggaggcatatggaggatagaaggatggattttctgatcgtagagaaatacgaaataaaatggatagataaaatgctttataattatagacaacacccagataatgcaacaaagaacatcgagttgtacaatcaagtttttgaatggttaatctattatactttgaaaaaatggggagataagtatgagccgcactttaaaactcattgtggatggagacaactttctgaattgagattaaagaagtcttagaatagtatatcaaactaatatatctgtatgtataacttaatgagaaatagcatacatgataaataaggggtttatgaagaagatatggggtgctttcaaaatgaagtgggattgggtaattgtaggggcaggtatagcgggctgtacacttgctgaaagaatctctaacgaattagatcaatctgtgctaatagtggaaaaaagggatcatattggagggaatttatttgatcattatgatgaacatggtttgttgatccataaatatggtcctcatatttttcacactaattccaagaaggtttgggactatttatctcaattcacaaaatggttaccttactttcacaaagtactcggatttattgaaggtacaaaagtaccaatccctttcaactttaattcgattcaagcattatttccacacgaatatgctcgtaaattagaaaattcactactaaaagagtactcattaggagataaaatacctattttccaactccttgactctgatgtaaaggaaattcaaactttagctcaatacatttacaataaggtttatgaagggtatacaaaaaaacaatggaatctaaatccagaacaacttgataaatcggtgactggaagagtacctttctttgttagtagaaataactgttattttcaagatacttatcaaggagttccactaaatggttatacgaatatgattaagaaaatgattgaaaatccgaaggtgaaaattttattgaaagcagattataaagaagtaataaaatcaattaaatatactagaatggtttatacaggtacaattgattacttttttgattataaatttggtcagcttccttatcgaagtttgaactttgagtttaaacattattctagtgagagttatcaggaagcagctcaggtaaatttcccaaacgaatataatttcacgagaattacagaatacaaaaagataactggtcagcattcaaaaggcactactatctctttagagtatccgattgaatatttaaaggaaataaatgaaccttattatcctataccaaaaacggagaacaaagatctttatagaaaatataatcttgaagcagagaagctaaaagaaaaagtgattttcttggggagattagctgagtataaatacttcaatatggatcaaatagttggaagagcactctcggttttcgaaagggatatttttaataaaaaactataaatgcaactacttgtctatacctatatttttccttctatagtcttgaatcgtccttattaaaccatttttcaagtcaattactggttcccatcctattaaagatcttgctttttgaatacagggaagccttcttattggatcatcaataggaagtggcttaaatataatttcacttgaacttttagctagttctttgaccaattcagcgacttctattatagtatgctctttgggatgacctatatttattatctcgccagttgttttagaatcttccataatcatttttaaacctcgtatagtatcatctatataacaaaaagcacgggtttgttttccgtcaccataaacagtaatatcccaattatttattgcctggttaacaaagtttgaaattactcttccatcatcagatgaaagtccagctgaataagtattaaatagtcgaactacctttacctctaagttgtataaactatggaacaaatagcaatatacttcgcccaaacgttttgcttcatcataacatgctcttggaccccaggtgtttacattcccggtataatcctccttttgcgggtgtgtttcgggatttccataaacctcgctcgtactcgcaaacaagaattttgctttgtattttctggcaagcttcaataaattccgtgtgccattcgtatttacattaattgtatctatgggatgtaactgatagtgcttaggagatgcaggggaagctaaatgataaatttcatctatttttttgttctctattatcttttcaataccttcaatggtaatatcataattcagaaaagagaaattttcgtactgtttaagcttaattatgttttctatatttcccgaagatagattatcgatgcaaattatcttatgctttttcagtaacaaatctaatgctaaatgagatccaataaaacccgccccgccactaataataattgttttcacaatatccctcctacactcagatcttgaaattttaattgttgttgcaatacctatcaatatagtatgtatagcgttgttacatgtttaggcaaataaccaagcgggaggctcaaagtgatattaataataggtggagctggttatatagggagtcatgttgtaaagcaagtgtctgagaaggggtttgacgttattgtatttgataacctttctactggtcatattgatgccgttaattcaagggctacatttatctatggagatctattaaataaagaggatctaacaaatgtttttatcaaatatccaattacaactgttattcaattagcagcttgttgttatgtaggtgaatcagttatcaatccctcccattactacttaaacaatgttgcaggtatggcaattttacttgatgcgatgaagaaacataatatcaaaactttagtattctcatcatcctgtgcagtttatggtaaagcgtctgatgcactcattacagaaatagcagaaaaaaaacctataaatccatatggatgttcaaaattaatgggtgaacaaatgattcgggattgttcgaaagcttttgatttggaatatatcatattgcgcttctttaatgtcgcaggtgcagattcatcaggagacctcggcgaagatcacatacctgaaacacacttaatccctaatgtaattaaaagtataattgacaacgatgaaaagagtgtaaatgtcctgggagctgattatcaaacaagggatggtacatgtattagagatttcatacatgtagaggatcttgctaatgctcattttctggcgttattgtctttaattaataaggagaatctaaatcaaatttataatgttggaattggaaagggatacaccgttaaagaagtcattcaattttgtgaaacaatattaactaaaaaagcaaatgtttcttataaaaagagaagggaaggagatccacctattttaattgcttcaaatgaaaaaataaaagcggagttaggttggtatcctaaatatggaataaatgaaatgatccaatcagcttcgaattggtttcaaaaaaaccctcaaggatattcaaaataaatggctttaggaggaggaagggtgaatgatgaatgataagtgttattacatgtacaataagagaccaatgcttggagaacgttttcagtaatttcttaagtcaaacattctctgaaaaagagttgattattgtactaaatgacgaatctatgaatttgacctcgtggaccgataaagctagtcaatacagcaatgttaaggtttatatgttgtctaaaaaatatacattaggggagtgcttaaactttgcaggagagaaagcaaactatgagttcattgctaactttgaagatgatgactattactcaccagattatataaaagagtcatattcaaaattaacaaaacttaaattagatgttctaggtaaaacaactgtctatatctattttaaatctaggcagacattatccttatttaatccgggaaacgaaaatcaatacatcaaacataatactagcttcggcaaacaatatcttcaaggaagtacactctttttcaaaaagactgttctcaatgaagttaaatttcctactcagataagagaggttgatcgaatatttacggtaaattgtataaagaaaaacctaaatgtttattcaggaagcagagatcactttgtgtatgtaagagagagtgatcataataaacacacatggagaataccggaagaactgttattgaaagttagtaaatttattgcacagacaactgactatacaaaacatatttaaattttgcctaattagtcttgaggaataaggaaaagaaatggagtggcatttatgctcgtctctgtagtaatggcggtatataatgaagaatcatatttaaaggatgccattaacagcatccttcatcagacatataccaattttgaatttattatagtgaacgatggctctacagataacacaaaacgaattttagatcagattatagacgaaagagtacgtgtcattcatcttgagaaaaataaaggagctgctaatgctttaaatatagggataagtgaagctaacggtaactggattgccatacaagacggagatgaccttagcctcccaacaagattagaagaacaaacaaattatatgcatcaacaacaagaaatcattgctattggtgcacttaagaaatgtattagtggatctgatgccatgtgggataagcggctgaaaactgaagaacatggaaatttcttagtagatagtgaacatttaagaatgtatcgcttttacattaatcctctctgccatggctctatgttgttttctaaggacgtgttcaatcaagtaggcggttataataagtcctataaagtttgttatgactacgacttgtggttgaggatgtttgaaagaggtcagatacataaacttccaaaagttttgtatcaatatagagtacactcaggctccttaagtaaaggcaatgatgaattcattaatgaagattgggttgttgtggtcaagtacattaacaaaataattatgaacaagacgaaagcaggcgaaccaacatatgttgttttggggaataaggaggcttgcaaagaatttgagaaaatttccaatatttataatttggctgtagatcgttatgtcaatactgttaaatcgagaactacagaacatatttttcagcaatttttaaataaacaagtcgatgctgttatcatacttgaaggaattcaattttcaagtgcgtttcaaaggttacaaaatatgggcatggagatgaatgaaaacctttttaaaatttgggctggttatttgaatgattgagtatttacgctatttttttttagcgaattttattaatttaagattgtagacgactagataaaagtttgaattgcttaagaattagattttaagcaaggaaggaatgtggcgatatgatttcggttattacttgtacaaatagagaagagagtttaataaatattttaatgaattatgatagacaacactacaagcataaagaattagtaatcataattaataataattcaatcgatttagatgagtggaaaagcaaaagccaaaagtataaacacgtaaaaattttaaaggaggatgaaaatcaatctcttggtaaatgtttgaatatagggattcagcaagcaagaggttattttattgcaaagtttgatgatgatgattactatagttctcagtatttatctcaatcacttaaagctttaagaaatgcaaaggttaatgtaattgggaaaacaagaatatatatgtattttgagagtgaaaagttattgacgatatttaatccttataagtttgctggctctatgtcaaatagtgaagaagtttataataccgcgattctaatgggaggtacgttatttgttaagaaaagtgtttttcaaaacataggttttcgtgacacatctgttggagaagataccgccttctgtgaggattgtaagctaaatggcattaaaactttttcttctacaattaagggatatgtttatattcgaaaagaagaaaatagccattcatggaaaatggaaaacaataaacttaaaaagttttgtactgttgttgaatatacggaagattacaaatcgaaaatagattactaatattgagcaggggcacagtaaactgctcttttgttatgaaaaaaaaaggctcaaatattagatttcttggaccgagaaatagttccaagaaataatataagtgcctaattattaaagggcatgaatatattttttatagtagtctaatagcttgtatttttctgcaatctacaataaatggataatcttcatcaagaaaagtagcacagcaagatttaggatcgaagcaagcaaaagttagatctgtaaactcgtcttctccattgagtactaggtcgactaaatctcctggccttaattttctaagttcatcgcatacgcagccatcacatttactagtaggagaggattttcttttaccacagccgcaatcgttatcatcaaataaactcatcattattcctcctttgatttgtttaacccttttaattttaaggattaatacactatattttaaaaatgaaggtaatgcatggtttaaagcctatcaatatctaaaatggttgtttgtcttataccaataattttctttaaaagcttgaataggaaagggtataaaggggaacacgttgatgtttttatcaataaataccatcatattatttatcatataagtttaattgtcgttatttattaaaatgtggtttttttgtccatgcacttgatggttaattacatatgaatgtaaagagtaggaatgacttgcctacattaacaggttgaaaggaggaaaagttttatggcgagtaaattgtttattaagttacgtagttacattggcgtacctctagctgaaatgtatttaagagatactggtaattcgggagacccagtgttaacgaatgtaacaatcattgaagtaggtagcgactatgtggttattaatcaaccaggttcaggcggttttggggaagtaataattcctttgcaaaacatagttgcatgcgtagagtattagagtatttaattcagaaggactccaattagttattggagtccttctattctctctccattgtatagatatgcgtatgaatgtaatatcaaaagcaaaatgctgtcgaaacgagtaaagaggtaagtgataaagtttatcgaagaaaaactgggcaataacgaaagtgacaaaaaccaatgaacctgattgctgtaaagttttgtaatcttctgttacgttacaacaaagtacatgcttagtataaggacccgtatttaccgttgagtgagcagtcgaataatcaaataatgattatcatccaaatagatgtgaaagaacgagggggtaacaatgaaaaaaatgacgattctgtttataacgaataatgtctcaaactatatagagaaaagtacaaattatttaattgatgagctaaaaaggcacgtccaccttattttatggcatcaacatggagaagcacaggagatttttaggtcgctagaaactaagccagattttatcttactaaatgatattcatccagtttatgggaggtatattacaggcttagatgagattaacgttcctgtagggatgattgtgcatgatttgcattataaaagaaggactcgaaaaaaattgatgagcacaatatccccggcaatcgtttttacacactaccgggacgcatttattagtaactattctgagttcacggatcaaatgatctggtttcctcatcatgtccccgacaagatatttaaagattatcagcatagaaaagaaattgatcttttaatgctcggaagcatgataccaaacttatatccattcagaaatcagatatatgatgaattaagaaagaaacagggatttcgttatcatgcacatccaggttatgaaatgaatcatgcgcattctttaactggagaagcatatgctcgggaaattaatcgttcaaagatctttctgacgtgtgattctatatatcattatccgttgctaaagtatgttgaagcggttgcgtgtaacaccttgctgctagctccaggctctaatgaacttgaggatttagggtttagaaatgaagaaacctttattcgtgtggatgaaaagaattttttggataaagtccatttctatctcgaaaatgactctgagcggataaggattgcaaggcaaggatatgaaatggtaagaaaacgtcatttaacttctataagagcggtagaaatggtgcaacacattcatgaggttatatgaatgtgttgttttcattattatgctaactgcaacatttcaataaaacgaacagcatacgtttcaggatttaagatgcattgaatatggttctttgcttgcatttttattcgatttcttaatgggatgtctgtcaataaatcgctgccttcgtttacagcttcagtcatgtttgttaaatcaatcagtttgcccgtttggttgtgaagcacgaaacttcgtacgccatctgagtcggtagttaccacgggacagtggcagctgatggcttcaactaatgcataaccaaacccttcaataagagaggtagagcataaaaaaccacctgaatctccaatcattgaataatattttgccatttcagtatgagggacgtttgtgtaaaaagaggtgctttcttttagattaagttcataacacttagcattaaagtcttcttgttcctgaggagaagctagagtaggatcgtgaaacatccatactgctaatgcatgtcgtttttttagttcagagatataggtgaggaagcctcgccaatttttattaggctctagacggccgacccatccaatgattggtacacttggaattgaattttctgtcctatactggaaccttttcgtatcaaagcaattatggaacgaaaaaaacgggaaattaggcaagtatttcttcactagtgaagatagatgagacgtatatggataatggatagcgtcgctgaagctttcaacataaggagaagcttggcgcatccatcgttcggcttcttctattgttccaagcccctgaacttcataaattaatttccctttaaatccgagtgagcgaattctctttagaaataaatggtcagagcaaacaacgatatgtgtatactgattcattttcataagctgctgaatttcctgatcgctgtttgtgacatgaacggggatacgatgaatatttgaaaagccatttccactttgcatataaaggagctcacatgacactccagccctttctaacgcaagacacctctcccggtttaacgtctcaactccaccacttggtaagtaataaacaaataatactttcatagttagcctcccttttcttgttattacaatatgcaaaagaagacaaatactcgaagaaaaacgagaccattttttggtctcgttttaaattatccgaaagagattcctgcgaatgtgattggtccgactacgtttgcattatcaagaagaataagactttgatctaactccgctcgaagtgaataatcataataaccacctggtggattattatcaacagctgtgaaggaaagcgtttgataatctgcaactcctgtgtccaatgagatgcgagtgctgaaaatgatcatcgaattgcgatagattgtgataaggatcgtagggtctgatgaagtcgctctcacccctacagtggcgttgcactctacttcactgacttgatcaggtacatatagtccaaagcttgctaacgtaatgcgggatggagagcgtgggattactcgcgtgattgaattactagaagcagttggcacacttttattatagtcaaatatttgcttagccataaaggacctccttcctaagagatagcttatcctatgcgaataaagcattaagcgattagacaggctacatctatttagtgaaaaagggcagaaggggcgtatgctgaaaataggagattgtccattgcgcctttaggtttccaacataagttaataagtgtaaataaagtagtagaaatgggggtcaatatgaaggtagcgacaatactgggcactcgaccagaaattatccgattaagtttaattattaataaactcgatcaattagctgacgaacatattctcattcatacaggacagaattcagctccttctctcagagatgtattctttaaagaaatggggatacggtctcctgattatatgctgtcaaatccagcgtcttccttaggagaacagctttcgtttatgtttcgaaaagtagaacaaattcttcatgctcatcaaccagatcgtatcttaattttgggagatacgaattcagctttatgtgctcttcttgcggagcgattaaacattcccgtcacccatatggaagctggcaatcgctgttttgatcttgaagtacctgaagaaaaaaaccgtaaagtgattgatgcagtatctagttataacttaccctacacacatcaaagtagagagaatctattaagggaaggttttccttcaaatcgcatttacgttactggaaatccgattcttgaagtattaacacactacaagacacaaattcaacaaagtcaaattctaaaaacacttaatttagaagaaaaagactattttttagtcacaattcaccgagccgagaatgtcgatcgtccagaaaagttggaggaaatatttaaaggattaacgcttattgcgaaagcctatcaaaagagaatcgtttgtagcgttcatcctagaacaaaatcaaaattaacgaacgaatacgcagatagtttacattcacttattgagctccacgaaccgtttggttttattgattttgtcaaactagaaaaatctgccctttgtgttttaacggatagtggtaccgtacaagaagaatgttgtttgtttcaagtgccgacagtaaccgttcgctcaactacagagcgacctgagacgatcgcatgtggaagtaatatgatctcaggtattgatgcagaaagcattaaacgagcggtggacgtcatgctttatcatcagccaaactggacgattccaacaggttatgaagacttaaatgtatcaggtcgcgtagtgaaatttatcttaggaggaatgcagattgttccgtgatcaaacgatattggtaacaggaggtactggttcctggggccatgaattaatcaaacagctgttacaaaaatccccaaaagaaatccgagttttttctcgaaatgaaacaagtcaggttgaaatgaagagagcgtttcatcaagattcacgcttaacgtttttaattggagatataaaagaaagggatagtttattagaagcaggaaaaggcgttgattatttattccatctagcagcgctaaagcatgtgccggtatgtgaggaccaaccaatagaagctttaaatactaacgtcatcggtactcaaaatgtgattcgtacagcaattgaaaataatgtaaaaaaagttgtttacatttcaactgacaaagctgcaaacccatccaatttctatggattttcaaaggcgatgggggagcggctaatcattcatgccaatacacttaaatcgaatacaacgtttgtatgtgtaagaggtggcaatgttcttggcaccaacggaagcgttattcacgtttttaataatcaaattcaaacgaaagcggaaattggcattactcatcttgaaatgacgcgatttttcttaacgattgaagatgcaattaaactactgttcaaagcaacttatgaaagtagggggggcgaaatatttgtaatgaagatgccgacctgtaaaattattgatcttgcagaagttcttattgagtcttctggtgtacaaaatgtgaaaatacgtgagcaggggataagaccaggagaaaagcttcatgagattcttttctcagaatatgaaagtcaatccacggtttactatgataaggagtactttgtcattctacctgctattaaaatcaaaggccttcacgaacgctacgagaacttccaaccggttacgctaaaaaactataactctggtgaagatgttatgacaaaagcagaaatcaaagcgatgctcattaaaggtgggttcatctaatgaagctgttggtacttggcggaaaagggatggcaggtcacgttcttactgcatatctaaaacaaaagcataaagaagtttattacacgtcaagggatgcgacagatgaaactggttatgtgctcgatgtattagatacgcttcagttagaaacgcttattgaagaattacagccagatgttgtcattaatgcaattggcatcttaaatgagcatgccgaacaaaatgagcagttggcatttcaaataaatgcgcttttgccacatcagcttgtaaagttaatgaaccgacgaaaaggaaaagttattcatataagcacagattgtgtatttaaaggtgacaaaggttattatacagaaaccgatcagcctgacggtacatcggtatatgccaaaacaaaagcacttggtgaaataaccgattccccgcacttaacagttagaacttctatcatcggtcctgagttgaaggaaaatggcattggtttattactgtggtttttgaagcagaagggtgaaattaaaggatttaatcaagcattatggaatggcgttacgacgttagaacttgctaaagccattgattactttcttgaacaaaagacgactgggttgtatcacttgcatgctccggagcggatttcaaagttcgagcttttaggtttatttaaagaagtattcgaaaaggacgatgtaaccattgttccttcaaacagtgtaaagcttgaccgaacgattgttcatactcgaaaagatgttttttatgaagttaaaccttatcgggtgatgcttcaggagttaaaagtatggatgaaagttgatgactaaatcaacgattctcgtcactggagccactggttttacaggttatcatgcagtgagacagttacgaaaaaattaccatgtagttggcacttcacgatacggaaacaaagaaacaataagagtggacctcacgaatcaaattgctgtacatgagatggtagcgaaggtgaaacctgatctgattctgcatttagcaggacaaaataatgtgaagctatcatggaaagaccctgctgttacgattgaaagcaatgtgcttgccactctttatcttcttgaagcagcgagagttcacgttcctaagtgtcgaattgtggtcgttggttctgctcttcaaaccgaaagcgcctatcctcatccgtatagctttagtaaatcactccaggcgaaactggcactcacctggggagatttatatggaatgtctacactcttggcgattccttgtaatttaataggtcctgggccatctacgggtatttgtacattaatcgcaaatcagctggttcgagctaataaatctacggatattcaattatcaaatgcacttgccaaaagagattatctcgatgtgagagatgcggcgagagcctatgagttacttcttgcaaaaggtgacgttggaaaaatatacgaaataggaagcggacgtgaacggacgcttgaagaagtagtggatgagtttcaaaaaatgaccctaactcgtttgaacgtttcatatgaagagcgaaaaccagaagtaaaagatagaagttcgctcactgctataagtcaacttgggtggcagccagtaatttcatttgaaacttcacttcgagacattatgcgttacgccgaagagaacgaaatgaaaagagggaaagtatgaaaaaagtatcgattattatccccttttataattgtgaatacattgacgatgcaatagaaagtgctttagcccagacgtataaaaacattgaagtgatagttgttaatgacggttcaacagtctattccgaaaaaataaaaccatattacaaccgcatttgttatattgaacaggggaacaaaggaacagcaggtgcactaaatacgggtattgctaatgcgactggtgactactttacatggttaagcgctgacgacctatatgaacctactaaagtagaaaaacaactaaacgatctggaacagtctaaccaggtgattagctattcctcttatgtattgatcgataagttagggaatgtgataagtggctcaatcggagttccatttccagatcgcttatcatttttgaaacatttaagacgaggctgtgccattaatgggtgcacggtaatggtcaaaatggatgtgctgcgtgctttagggggctttaatgaatcacttcgctttacccatgattatgatttatgggcaagaattgcaaaggattattcattttcctatattgatgaatgtcttgtaaggtatcgcgtgcataacgagatggggactaacaaacacaaggaaactataagaatagagctctcccaagtaaaaagaaaaataaggctccttttaaaagaagcgttgataaaagagcagatgaagcgatgaaattcacttttccgattattacgctttgtaaaggcggcgctcaaagaatgctagcagaaataacaaatggacttgtggatcgtgggcatgaagtaacgcttctcatgccaatcgaaggagttattgagtattctgttaaatcaaatgtaaaaagaactgcggaattatacacgattcctgaatcatcatatccagtagcagatgtgatcgtatcaaattactataccctgattgaaaacgctgaaatggccagtcgaaataacaaaggtgttcacattcgactgagtctctgctatgagcctacctttttacctgaacaggaattgtctttccctagttatcatgtaacacccaaccttctcgttttatcgaagtggcaacaagaattaattcgattaaatcacgggattacaggagcgattgtgccagttggaattagtaaacaattttataacatgggaatacgttcaaccaatatagttcctaacttaacggccatgctaagaaaaccagaagggggacactcatggcatcgtgagcaggaatatttgctcaaccaattgactgaagttcagaaggtattccctaacgctcgctacacattaattagtccaccaaatgaattgacttcttcaaaagcgctccaagccattcaagcatcaggaaagtatcgttttcttacgccagcagatgatcaggagttagcatatcattataatgaggcagatgtctttgttaactcttctacttatgacactgcttctcttccaggacttgaagcaatgaagtgtggtgcggctcttgtgacaacttacaatggggggaaccttgattattgtcagcacggcattaattcgctcgtatcttatcgctatgaaaaccgtcttgctaaagatgtgcttactttattaaataatcccgactatcgaaaagaacttgcgtataatggtgaaaaggaaacagaaaaatggacgtgggagcgaagtgttgacaaatttttaactgcagttcaggaaatgagaaaaacgaccggataattccggtcgtttattgttggtttggtttccaatttgatttcccgcatgttcggcagccttttgtctgaacgggtgatgcctttctaactcttctttttcgcttcacttctttataaatttcctgtaaacgtgatttcttcatccttctcctcctgaaacgcttctctttagtccatcttattcttctcagaaagggaaggtgtgattagaatgacctcttttgatgaaatgggttaatcaccgatgtttttcgtttcgtatgattaaatttaaacggatcaaatggaatgggatcaaataaagaatgtgcatcagaaaaaggattaatcggttttggatgaagatcctttttcttaggtatttcggttttcatttggttaggtacgtcgggccaatctgaatgggcctgggttgttttctgatgcaaggaaagcgtcggatttactttttctaatacggttgtaactaatttttcatagcgatcgattggaatatggtgaatcggtttgaaagaagatttcataaaatattgaatgatcatataagagagccattcgattgctgttatatgatcgtcttcctttatgacgcatgtaatggctgagttcgaaacaggtaaccatgcgttcttatgaattctcttctgaagatcaagacttttagcatgaagcgccttgggtcgaacttttttagcattcataaggacggataatggtgaatcgaggtgcttagaaaccgccatggtgatcattatatcgctgttttcctcaattggggtcgcttcaatcccagtatgcctcactaactccattaatgagtaagcataatcgcttcgttcacaagctaggtggagctttttttcgagtagagacggtatcaatgtggtttcattcaattccaatccccagtatggcagcaccaataataacgtgtctacttcttcttctgtaagctgacaaatcaatttatctttccatataaggttgatcaaaagggtgaactcctttcttatcgttttaaaacgcatataaaatttgggcagctcctactgttgcatttctgtgctaattccatagtatgtagggaatcaacctatcatgtgaaagaaaggaaggaacgatatgggtcacaaaccacataagaaacacgccgttccaacagctacaaatagcttgcaggatgagtgtattcgcgttcaaaaagtatacgactgggtgaccgatcagctttctgtaaagaagaaaattcattttacagatcatgagcttaaaaagatcgagtgtgctatggaagatcctagccgccgtcctcttcgtatagtatgtaaaacaccagaagcccctccattgttcccgctctcgggtagcgagcatacggaggatgacttcttctgtgaacaaattggagaaaagcgtgatgttagcgtagcgatccctggtgggggatttgcggatgctcaactcgttgaccttctctttacaactgatgtgaaggtgaaggtggttgaccgtcatggaaaattagtaacagaggtcggttgcaacgcatctgtgcttgaatcattcgttttgtgtttcccgaatgggacagatctattctgcagaattactaaaattgtttgccgcattccttctggtacagtcctgctaaattgcccggctcccgcttcatttgatcttgaagtaattttctgtgttgatattcaagtagaagcagaagtaaaactcgaggtacttgctaaattctgttcaccacgagacaatgatcttcttgcgcctgactctgactcaattaatgaatgtcctccagttgaattccctgaacagtgtccagatatattccctcgaccaaactgtgattgttctttggctggtgaagcgagcggccaaacagatggtgaagatgatgaaggaaaagctactctacttgtgaatatatgcaatgactgtagcctctcaggtagctcgatgaaactgaatttccatgacacggattcaagtgatggaaagcacgactttacattcacggctacaagctttgatcaagatacactcgaatgcaaagagtgtggggatggattgaagttcatcattgaggggagcggagaaaccgatcgcggtcgtacgtttgactttaaactagctgttgtagactctgacgatgatcagtggttcgaagtacatttactgaaccgcagaggaaaagtggtctttaatacaggaacagtagaagttgaagaaggcgaattaacaatcgatgattgtattacgtttgaagatttaaagtataagaggcagccttaaatcagtagtgcaggagatcaaatcctgcacttttttgttatgaaagaagacctaactctcatacatatagaataagggaagcgctggatagagaggggggagttccgtgcagggtgaaaagttaagttattctcgtctcattacacgtacaaaatacttccaagaaaaatcacttgaacttgagaaagaacttatttttgcgaacgatcaattggcttcgcttgagaagcaaatcgaattaagcaaaaatcatgaaagtacgatttcgagtttgaaaaaagaattaaacgagttagaaaaaaagcttgaaaagcaggcgcaggagcatgttcgatttcaaaacgaagtggagtcctcgaaaaaaacttccgaggttagaaaagaagaaaaaacaaagatcaaaggatatgaagatttactggcagatatgcaactggaaattaatgaaaaagacaagcgactccaacattaccaagggaaaattaaaaaccttgaaaagagagcacaatatcaggcagctgatgtaacggaagtagaagcgcagtcaaccgatgtcgtagatcactacgcagttagttactttaatacatccattattattagtgataaacagtctgtcatgatacgcggtgacttacaaattgaaaattgtggagcgctaaaattaaggaatccgctcgtttgttttcggtttctgccatcagaaatggcaacattaaaaggaaggatttatccaattgaacatgctgaaacaaaatctcttgattcaagcgatcgaattcaatgggtttttcctgatcatgattggttggagaaagcgaaagagaaaggagaaatatgggtttctccattacagccagtgacgctaaaacctggagataaaattagcattgaaagttttcaaatcccgatcaaatctgaatttaaagagcctgttattatagaaggttttgtttattttcaaagtgataactacaggattaaagtgtccaatcaaatagcattaagctactaatatagatggtgcccatacctgtgtttctcttcctgcataggataatgtgaagtaggaggatagaagggggaagggtaagaatgtctgaaaagaaaagaaaaccacaagttattcatgtagatcgtgtgatcattaaagcgaatgaagtcattatccaagaagaacgcgaagagcatgaacataaaaaagaggagcgaagagaaaatcgtcgtgatccctggggcttttttggttcaactgacgcagctgatgaggatagggaacgtgacggtagagaagatgaggatgataaggaagggcgttactggttttaagagcagagtattctgctctttttttatttatcatacttttgtaaaaagacttcatcatcttgtttccactcaagaagcaatacctctgaatactgatcaatatggtgtttctttaacgttttattgagccattcttcgttcaatccagcatcttttaaattttcccaatcaatttttccatcagagataatcgaataagagagatatcctcgagccggttttagattaaaatcttgtttcgttggttcttgataatctgatctctttaatacactaatgcttccattcgtctcaaggatggcgaattcaacttcattcattgagaacacgtctttttggcgtaataaattttgaagttggttaatatcgagtttgtttctctttagctgatcgcgattgatttttccattgtgaatcacgatcgaaggctttccttcaagaaatgatcttgtaccgcgaaatttttgcgtaatccattcaacaacataaataagaactccccagagaagaacggagtatatgattgaaaaaatattaacgtgcttatcataaatcgcattcccaactagttcaccaagaacgagggaagaaataaagtcaaagggagtaatttgtgtgatttgagtttttccgagagctttcgttaatatgagtaaagctaaaaagccaataagaagctcaaccgtaatcgacccaatgttcaaattatcaccttctcctttttgttttccttacttagaatgtacgaaagaaggcaaaattaaagcataaatttaaaattataaataaaaaaacactggcggcaaccagtgtcataaattctttgtcattgtaacgtgcggaatcccggcgtccatgaattgttcagatatgattttatatccgagtttttcataaaatcctacggcacttatttgtgcgtttagctttgttcccttgaggctgaggttttttgcatgggtttcgattgcgctcatgagaaggaacccaagtcctgtgcctcggtaatcgccgagaacgcaaatgcgttcaactttggccatgtcatctaaaacgcgaaaacgaccggctgcaacgggggaacttttgtcataagcaacaaaatggatcgcatccttctcgtgttcatcgatttcgagttcagccggaacgttttgctcatcaacgaaaacggtatgccttactttaaaggcatcgctctgttctttctctgtttcaaccacgcgaacttccattagcgaactttaccaaggtggaacgtttcaaaaaccgtccacataccattttcaagctgataaagaagttggaaacgatcgatcatttcttcgtggttaacatccttcatttgcaagctaccatatacatcagaatgctcatcatcagaaaggttctgtgcgatcgtaatatgaggaacaaagttgtagtcccgctcagacagcgcctcttcaggattcaactttctatgcaaatcatccagtacttcattgtctttcactttaaagtaaatcacgttgttaacggggttaaaagaccctactttataaacatgcatcgaaaaaggtttagattcatcagagattttgtgtagaacgggtgttaacttctgaatctcttcttctgttgcctcaaagccttcacgtagcgtcaaatgtggtggaatgagcgcatagtgcggatcatatcgtttacgaaaggagttagcgacgtcttgtagttttttcgatgggaaaattgcaatgccgtatttcatattccattccctcctgattgatatactcgattgcctttgatcgacaagtcatataatgttccatttataattataccaaaaattcgaaaataagaaacgatagactcatttagagtttaaacatgtgtaaaagtgagcgcttcatatccggttgccagttcttccaaaggtgacccccatcaaattcatcatagaagtaatcaaattccttctcattaataatcttatttaattctcgattcggttctataaaattctttgttttaccatcagtggtaggaacctctgtttcttctttcccaataatgtgataaagcgaaagcaattcaggctcagcaaattctttcacttgattcatgattgcttcatcaacgtatggagagtgaagaatagcacggccaaatgtacgtggataatcaagagcagctcgtagcgcaacggtagcagctaaagagtcgccgataagaccgcgaccatacccgaggtgataggttgcatactcttcatccaaataaggaactagttcattagcaagaaaacgcaagtaatcatcactttgctctccatcaggatgatatttacgccagcgatcttctacacttttgtaaggaatgccgactatgattagttcttcaatttcatcattttcgataagttcatccgcagttcgtccaagtcgtcctaatttaaagtaatcgctaccatcattggcgattaaaaaggagtatttgtataagggagaatagttatatggtaaataaacttgaaaaggaatttcctcttttaaatactcactataaatggtttcgtccttgtatgtacctctgttcattgagatgcctcctataaattgttgcaattgttagattgtttgacaatgtaaaaaacattagtgatataatgattctaacacatatatatttatcgttgacagagaggggtcttattatgaagaaacgcatccacagcagagagacagaagcagcagcaaaagccctgataaaagaacgtggcgttacaatagaggacattgcggaaattgtttatgaaatgcaatctccttatgtagatgatctatccatgggagattgcgtagaaagtgttgaggccgttttaacaaagcgagaaattcagcacgccgttcttgttggcgttgagctggataagctagctgagcaggggaaactctcagaaccactccaatccatcgtggaaacggatgaagggttatttggcgttgacgaaacgattgcactcggtgccgtatttggctacggaagtattgccgttaccacatttggtcacctcgataaacaaaaattcggtattattgagaagttggatacaaaagtaggcgaaagcgttcatacttttcttgatgatctaatcgcaagcattgcagcaaatgcgtccagtcgtcttgcacaccgccttcgtgatcgagaagaagcgttagataaggaagagcgtgaaaagcgcgataaagaagaacggatcggttaaacaaaagggcatcaatcggatgccctttttctaatattttcccaagaaaggattgacagttgtttaaggagtcgtgtatattaataaatgtcttaatgatccgttagctcagttgggagagcgctaccttgacagggtagaggtcgttggttcgagcccaatacggatcaccatacataaaattataagctgcatctcaatttctgagatgcagcttttttaatgttattaaaattgacaaatagtatagaaaagacaacttctctaaaactcaggcaaatgatctaaattattctctttaatcccatccggctcactccgaatgatgtctcttccatacttgtggaaaacatccacgccagatagttgaccattcttagctttttctaatgtttgtagataatcaagttcttctccagtgtttgtcttaaaagcaatgaggtctccgtcttcatttcttctgacagccgtaatgtaagtggcatcctctttcggagtattcacattgaccttgtttgtaccgctttttacatatttttcatatgcttcagtgaatcgatccattgtcaggcactccttttaatgattggcgattgttaacaaatttggtatttcaagctcccaacgattcgtaatgggattttttttggctgttatctcaacagtcgtcgtaataacaccagcatctttaatataaacttcaacatttgtatgaataagttgtgcaaaagtcttttcggtacttttggtgactttccactttgtaaaagacaagcgtgagagtgctttaagatccgtttttgttatgtttttagaaagggttttttttagtatagaagtgtcagtgttattaatagcaagcatcagactatcaactaattcatccggtgtttggttcatcaaaaagtgatctaattgaccgcttgctttcatgatcattaagtggtgagcgggatcaggagttggcgttttatgtgtcgtactgttgaggaagtggagacagaagtgtccattgaatccattatctagcgctcctgccccgtgaggcataccgttcattgaagctgctatcgttcttccctcatataagacaatgacagctcttcgtttccaactccattcttcatagatcccttttaatacacgcgtatcttcttttgttaagggttggatatcagcgtgcttgcttcctgctcttctctgaacctgaaaagaagcaccgctttcaacatcaatcatcgtaaaaatggctttccgtggtatgacctcatctactttctcccatggtaggagtgtaatttcactgtcgattggtaggaggtcataaaagggttctacagcaaaagtgctttctgaaatggaaattgagcaaagcaacattgaaaaaaagagtaaccgcttcattaactcccccctgtttctgttgatcgttcttattttgctcaagccattttgaactattcgattttattaaagaggcttatgaagcatactacgatcgagttcagaaaggggaaatgacatgcttacaattctattagcattatcactggggtacgcaggagatggaaaagaacaacttatcattcaccggaatggcgacaacccacatcacattgaaaaacaagcgcttttttcagaatggctcggataccctttttatgaggaggaagaactgaataaattaatggagaaagtagataagtcgatttcaaaatctccaataaatgcctctatcgatccacaaggagttattaaagaaggggtcaatgggtatgcgttaaaccgtaatgtttttcgagaagtgcttttgcaaacgttgtatcaagaagggacgacatggattgaaccagaagtgaccatccgttatccgagagtaaatgcagagctgctcgcctcgatacgaaggaacgaagtaggcgcatttgttactcattttagaaaaaataatctagagcgtacgtcaaatattgtgctagctgctgaagctataaacaatacagtggtgtttcctggtgaaacgttctcgttcaatcgaacagtcggaaaacgtacaaaggaaagaggatatttaccggccccaattattgtgaaaggggaattatctgaagggataggcggaggaatatgtcaggtgtcatccactctatttaatgcggtggatcaagctggcgttcaaattatcgaacgttattcacacagtcgaagtgttccgtacgtgaagcctggacgagatgcaacggtaagctggtacggtcctgatttttcgtttcgtaatagaaaccaacagccattgctcattagcgcaaaagtagtagaggggtctgtggtgattcgtatttattcatctgaagaagagggataaaggtgtcatcgaactatacaattaagaatttcttcctattcgaaagcagtaaatcgttaagttctctacgcgtcaatgctataatgaaatcactctattcaaaaggagaccgcgtatggaatctaataaaacaaatcatccgaaaatttccatgcttaaagccggctctgaattggaaaagcaggatattaacctcgaactaatggagaaaagcagaaagcttgatcacatttttaatcattcccgagatggtatgactctttcagatcaaaatggaaatttggtggaaattaatcaggcttgttccgagatttttgaattagatatggaatcgattcattctaaaaaaattggccaccatgtcgctcctgaaggaattcgcacgtttcaaaaaatgagaagacatttagttgaggaaggttatgtcattgaaaagcttcctgttattcttgagaacggaaagcgtaaattcattgagttatcgataacctataaggcataccgtgatttaaatttatcgatcattcgagatgtaacagaagaacagtttcttttgaatcagttaacggaaagcgaagataaacttacgaatatttttgaaaatgctcttgatggtattttaatctggaatccagagcgaatgattgtagatgcaaatcctgccgcgtgtaagttatttaacataagtcttaacgaaataaaaacgtataatttatttgattttctcgaaggtaaaaatataacaattggaaaaacttttcaggaaagagtggaaagacacggagaggtccgtggagatattcagtttacaatgcctgatggtgaaaagaaacaattggagttcacaacaaaaaaaagtgcatatggcaatttatatttaacgatttatcgtgatattactcatacaaaacaaatgatccaagagcttcaacaaagtgaagaacgcttccgacagctgtttgaacgggcgctagatgggatggcaattctcgatcatgatggctatatcgttaatgtgaatgagtcattttgtcaaatgtttgaagtagataagaatctcattatttcaactcattattctcatcttgaaaatggttgtgatattacctgggaaaaacctgcaatgttaggaagaagtggtgaaggtaaaagacattgtcaaagtacaggtgaaaagcaatattttagttttacgctaagttacgagatttacccgaatcaccaccttgttatcattcgagaggtgacagagattaagaatgctgaagaagatttacgtaaaacagagaccacccacgtactcggtgatcttgctgcaagcgttgcgcacgaaattcgaaacccgttatcgactgtaaaaggttttctccaattacttgatggaaatgaagctgtaaatcaagagttactaaaagtagtgggagttgaaatgcagcagcttgaggcgattgttagcgagtttcttttactttcaaagcgtgaatttgtgtcatacgaaatagttaatttaaatgaaatgttggctgaattagttgaagatttatcgcagaaagcagccgaccgcaatattaatattgtcgaggtctacggaagtatagatgtggagtatagatgtattcgctcacatattaaacaagtgataatgaatttaatcaataacggaattgagtccatgccaaatggtggtcagttaaagactaaactattaaagactgagtatggcgaaattgttattgaagtggaggatcatggtgatggaataccagaccacttaatcaatcgcttaggtgagccttattaccaaacttcagaaaaaggtacggggctcggattaatggtaagctataaggtaattaaagaacacggtggtcaaatcgaggtaacgagtaagaaaaacgaaggtacggtttttcgtataaagctacctgcaaacccaccattcgttcacatggaaaaggaggagtagaagtgattgaggttcaacaaatacaccacgtaagtttagcggttacagacattgaaagagccaaaaggttttatcgagaaatcttgtgcctggaggaaattgatcgaccgaattttggctttccaggcgcctggtatcaaatcggaagtcagcaacttcatcttattgtttatccggaagcaaatacgcttcgcgggacaaatgaattatcttcaagggaagggcattttgcctttcgagtgaagagttatgacgatacgctccgctggcttaaggaaaaaggcgtaacaatttatgaaaacccaacgagtaaaagtggttttgcgcaaatttttgttgctgatcctgatgggaatttaattgagttaaatactgaacaataaaaaggcgccttatggcgcctttttattatggatgagaaggaaattcgttcttttcacgttggggattagcgctttttttcgcttcctttacaacttccttcgctttttgtgcacgtcgttgatcttccttcgccttttcttcaatctttctaatctcttctcttgaatgttccactttagttatcctcctatttttatccaaaatttgatgagtgaattggataaatggttatttaacgtaccttaccgtaaattaataaaagaatcaagttttttctgtttattccgacatcttatcttatctctacacatatgatggaaagaaatgaacagaggaggacttcgatggtaggagtattgttaacaatggttgtgctgtttcttggactagctctttttatggcagtcgtatggaatgcaatcaaagctgattctgcaaagtctgatcttgaaatgatgtgggaaaagtatgaggaagtgattaggaaggaagacgtgctctagcccgattaggggcttttttctttggggtaaacgagaaatagttggctaaaatgtgatgagatgttgttttcaaatcctagaatcagggtaatttaaaatagaattgaggtgaagcaactatggggatacgaacgaaattaagaagaaatcgaactcaaaaaaaaggaatgccgccggggtctctcgtttatattggggatgaacaaacagaagaagtaacaatttcagctatcgctttcgacagtgatggaattgacgaatacgagaatgcatcacttgatgaagtgaaaacaatgattgattccgaaaaagttacctgggttaatgtgaatggtgtacataatgttcaactggttgatcaaataagcaagcatgtggggttgcacccattaacaacagaagatatcttaaataccgagcatcgaccgaaaatcgatttttttgaagatcacttattggcaattgtaaaaatgcttcatttaccagaagaaagcccagatctcgatgatgagcaagttagttttatcttgatggaaaataccgtaatcactttccaggaaaagcgcggtgatttatttgatcctgtccgccttcagcttcaggaaagtaagggacgtataagaaaaagcggtgctgattttcttttctattccttactcgatgtcatatttgatcaataccttatcataatggatgagatggatgatcgaattgctcagcttgaaggaatgatcatggaagatcctgataatcattcgctacaagacattaatcagtataagaacaccatccttcaattaaagaaaacagtgtggcctgtaagagaagttgtgaacaagttaattaatcgcaaagtttcttacattaaagaagatatctctttttacctacaagatattcatgatcacattgttcaggcgaacgatatggtcgaaacatcaagaggtcaattatatggcttattggatgtgtattattctagtttaagtatgaaaatgaatgaaattatgaaagtgttaaccatcgtttccactatttttattccattaacgtttattgcaggaatctatgggatgaacttcaacaatatgcctgaattaagttggaagtggagctacccagctgtatggattgtcatgattatcattactggattaatgctcatgtatttcaaaagaaaaaagtggttctaggaggagaaattgatggataaagtcgctgttgttacaggtgctggtcatggtatagggagaggcgttgcgattgcttatagcgagcaggggtatcgcgttatccttgctgatttaaatgaagaaggttgcaaagaaacgaaacgtttaatgaaagaagatgcgacagatattatccttacagacgtaagtcagccagaggcgatcacccgtctttttcataaagtagaagagaaatatggacgtttagacattttaattaacaacgcaggcttatcagaatttaagaaaatggatgagctaaccgtgaacgaatgggacaaggttatgaacacaaatttaagaagcgtttttcttggatcacgcgctgcagcagctgtaatgagaaaaaataacgggggatcaatcgtcaacatcgcttctacaagagcttctatgtcagaaccgaacagtgaagcatatgctgctacgaagggtgggatcgtagcgctcacacacgcgcttgccatttcccttgctgatgaccatatcaccgtcaattcaataagccctggttggattgaagtggagaattatgattctctgcgtcaggtggatcatgaacagcacccggcaaaaagagtggggaaaccttctgatattggacgtgcgtgtctctttctaacaaatgaagagaataattttgtgactggtgagaatctggtggttgatggaggcatgactcgaaaaatgatttatgagcattaatcgacttacagttaacggacaatccccattcatgttactataaaagcagaccttccttagagaaaattaacagggcgaattatgcttgaggggacgttttaaatggcaaaacatatggaaatacctaatttgtatgaaacaggaattgaagatcttgtgatttcagcagaaaaagtagcgcatgtacagctgacgaatcctttggagcacgcaatgcttatcttgatcaagtcaggatattcatcgatacccgtattagatacagaataccggttaaaaggattgatcagtcagccgcttatcctcgattctatcttagggattgagcgaattgaatttgaaaagttaagtgaattagtcgtccaagaagtcatgaatacggatataccatgcattaatgaaaatgatggattttttaaaggattaaagttagcgattgaccacccgtttctctgtgttgtcgatgacgagaacatctttaaaggtatattgacgagaagggcgcttcttaaattcgttaaccgttatttgcatgaatcttccgtgcgacagtcataatgatttacccggttctttaaccgggcttttttacataggtggagttgagagaaatgaaatcgctaacaaatcaaatatcctatagtattagaaaaaaagaaacaaaccgaccgctcgttctcggtgcgattattatcggtatgtttatggcggcaattgaaggaacgattgtttccacagctatgcctggcattgtaggggatcttggtggattttcaacatttagctgggtattttcagcgtacttattaatgtctgccatcactgtgcttattttcgggaaactttctgatttatttggaagaaagcccatttatacgattggcgtcgtgatctttctgatcgggtcacttttatgtgggtttgcggagtcgatggaaacgcttatcctttttaggctaattcaggggattggggcaggggccgttcaaccgattgctcttacgattgtaggagatatgtatacaatggaagaaagagcgaaaatacagggatatcttgcaagtgtatggggaatttcggctattgcaggaccagcccttggcggtgtttttgttcaatacctagattgggcctgggttttttggatgaacatcccgcttggtattttatcgttggttggaattgttcttctgcttcatgaatccattgataaagaaagaaaatcaattgattatgcaggagcagcacttctacttgtgtccatcagtgcgctaatggtcgtgttaattgaaggaggagttcactgggcttggacatcagctccaatcttaattctcgtcagtatttcaattgtagcgatggttctgttttttagagtagaacgaaaggtgaaagaaccgctaatgccacttgggatttggcgggatcctgttatcgctatttcaaattccgttacgtttacaacagggatgattttaattggagtttcgagttttcttccgacatttgttcaaggagttatggaagagccccctattattgcgggttttacccttacaacgatgtcgattgggtggccgattgcatcaaccattgctggtaagcttgtgatcaaaattggattcagggtcacttcagtgcttggaggtatcgcccttattagtggttctaccatctatcttttgatgactcctgcacttggccctatttttgcaggagttggttcgtttttcattggagttggaatggggttaacctctacaacgtttatcgtagccattcaaagcgctgtctcttggaaacagagaggcattgcaacagcttcaaatatgtttatgagaacattaggaagtgcagtgggtgcagcattacttggcggtattttaaatagccggctgcagaaatacttagcaaatcatacttcaagtgacgaggttaatatcaatactgccaatcaattacttgatgaagcaaagagaaaaagtcttgacccaacagttcttgaactgttacaaagtggattaactacctcattaaagtgggtatatgggggagtagctgtcttcgcacttattagttttgttctggttctttttttacccaaaaaagcgaagtcaacttccaaggaaaaagaacttcatcatgaataaagttgagaaaaaacccggctcggtcaagagtcgggtttagctatacgtgaaatgaactcaattcgattacggaaaggatcatagaagctaaagcgctgaaaaccttcgatcgggatttcctcttgaatcgtaatgttgcgcttttcgagataccctcttacttcatttaggttattaatctcaaatgcagggtgccttttacccgggacgatcgtgtcctctgttccgatatgaagctcaatgttcgctcctttaagccagaagccaccatttttctttaacgcttctggtttttctatttctacaaagcctaatgtttcaatataaaattgttttgctttctcttccttccctgtcggtatgcaaatttgaacatggtgaaggcgtagataatcgataatcatttcagctcactcctaaaattgggtttttataaggctatagcaaacttgaaaaatcaaaagaatcgtcatcgagcgtagtaaccagtttacttgatgaaaagaaagtttatttgccattcgaacagaaagctgagccccagtaatggaaccagctgcaagaggaagggcgatcgctatattgagatgaccgttaagtaaatagacgatgacggctccggtacagcttagaaatgtattaaatcttgttagtccaatggaagtaagataggcgattccgctttgacgaaagagatgcatctgcagtgtcgcctgtccaggcccaaatgttccgtcataccatccaataagaccaatgaaaggcaatgattgaacggggaccttatgcgatgaatgagttgattgcttttttttcatgaaggataaaactaaagcaagcacaagcattgttccagcgaaaatttgaagggcctgctccgaaagtaaggaggcaaatagaccaccaaggacaccaccacatagcgcaataggaccagtttttagtgcttccttcattgataattcttctcgcttcaataatacataaaagctagagaatgagcttagcatattggaaaacttgttagctgaaataatggaatgaatgggaaggccgagtaacatcatcgaaggcacgttaatgaggcctccgcttcctgataatgtgccgacaaaggtggcaataagcccaatgccaaataagaaaagtgagtccatgaatatcatctccatatgaaagatctctttatagtatagtcacctttcttccataatgaaattagattataataatgaattacgataagttattcttatagttaaagcttattggtgagaaaggagaacttcgatgagctcagaatatcaagtattatcgatcctagctgaagaaggaaatatgcgaagagccgctgaaagattgtatgtttcacaaccagcgttaagtcaacgacttcaatcaattgaaaaagcgtggggtgttccaatttttcttcgctcccaaagaggattaacgattacaccagcgggagagcgtatcattgcttttgcgaatgatacgattcgtagagaagaaaaagtgtttgaggcgttgactgcgttaagctctgaagttcacggaacgttaaaattagctgttgcgtctattattggacaatattggcttccggcagtattaaagaagtttgttgaacattatccaagcgtaaaaatctcactggtcaccggatggagcagcgatattttacggtatttgtatgaagatgatattcatattgggatcattcgtggaaagcccgattggcgagggagaagtcagtacttgctttcagatgagctttaccttgtggatacagcgattcaatcgatggaagagttgaaggaaacagaaaaaccatttatacagtttaagagtgattctacttattttcaagaaatacaagaatggtggcaaactcagtcatttgcccccccaaagaaaacgatcgtcgtagatcaaattgaaacgtgtaagcaaatggcgttaaatgggatcggctacgcaatcttaccttcgattagcattacagagaatgataaagagtattttcgcattcctctaaaagatggtgaaggattgccattaaagagagatacgtggttattaaccaatgatacggcaatgcaattgaagcaagttcaaaagtttgtcgaattattaagtgagtagcttgaaagattagacttcacgtgatcgatcatgtacgataaaatgtgtaacatgctttgttttataagcatgataacaaaggaggaattatccaatgaaaatgatggatgcaaacgaaattattagctttattcaaaacagtgagaaatcaactcctgtgaaagtacatattaaaggaaaccttgaaggaattgactttggtagcaacacgaagtcattcattacggggaatactggtgttcttttcggagagtggaaagacattaaaaaggcgcttgagtctgaagcttcaaatattgaagattacgtcgtagaaaacgatcgtcgtaattctgcaattccaatgcttgaccttaaaggtattcaagctcgtattgagcctggtgctgttattcgcgatcaagtggaaattggaaataacgctgttatcatgatgggcgcgatgatcaacatcggttccgttgtaggtgaaggaactatgatcgatatgaacgtggttcttggtggacgtgcgacggtcggtaagaactgtcacattggtgcaggctctgtgcttgctggtgtaattgagccaccatccgctagccctgtcattatcgaagacgatgttgttattggagcaaatgctgttgtacttgaaggtgtaaaagtaggaaaaggatcagtagtcgctgcaggtgccattgtgacagaagatgttcctgagtatacacttgttgctggaacaccagcacgtgtacttaagaaaattgatgatcaaactcgttcgaagacagaaatcaaaaaagagcttcgtcagctgcaaaacgactaattctgatggatattacatctgtccgaagagatttacatcgaattcctgaactaggttttaaggaatttaagacgcagcgttatttgcttcattttattgaaaacttgccacaggaccgtctccaggtgaaaacttggagcacgggtatccttgtgctagttaatggagaaaatccttcaaaaacaatcgggtatcgaaccgatattgacggacttccgattaaagaagagacagagtatgagtttcaatctgagcatgacggatacatgcatgcatgtggacatgattttcatatgacaattgcgctctcaatccttgaatactacgcaactcatcgcttgaaagataatttgttatttgtttttcaaccagcagaagaaggcccgggcggtgcgcttccaatgcttgatagtgaagagtttaaagcgtggaagcctgatcaaatgattgcattacacattgcacctgagtatccagtcgggacaatcgcaacaagaccaggattgctttttgcgaatacatctgagctgtttatcgatttaactggtaaaggtgggcatgctgcatacccgcatcatacgcgtgatatggtcgttgccgctagccatcttgtcacccagttccaatccattgtagcgaggaatgtcgatccgcttgactcagctgttgtcacagtagggaaaattgacggtggtacgaagcaaaacatcattgcagaaaaagcgcgattagaaggtacaattcgtacactttcggctgattcaatgtctaaagtaaaggaccgcattgaagcgattgtaagagggattgaggcatcatttgagtgtgaagcttcaattgattacggttcaaactattatcaagtgaacaatacgccagagctagttaagacgtttatggataaaatgaagcgtctttctgacgtatcattagtggaatgccgagaagccatgactggtgaagattttggttatttcttaaaagaaattcctggatttatgttctggcttggtgtgaattcttcatccggtcttcatacatctaccctcaaacccgatgagtctgcaattgaaacggcgcaccatgcgttaacatcctatttaaatgaaatagcaaactaagtttgtgagccttcaggtctttatgcctgagggcttttgttgtttcaagtgaaaggcgtataaaataacgaacgttggtgaacataaaagggtagcagttacatattaaaagagggaaggaatgagtaaagtgaaacgaattgctgttgaagacacgctttctgatgtggctcaggctttacaagcaaaaggatatgaggttgtttctttaaagcaagaaagtgatgcaaatggctgtgattgttgtgttgtctccggtcaggataaaaatgtgatggggatgcagtcggttagtacacaaggatcagtgattaatgcggatggcatgacagctgatcaagtatgtcagcaagtggacagtcgctaccaatagaaacacaaaaaaacccctaaagtgaattaggggtttttgcttagctgtttttttctttttgtacccagttcccattgtcgttcttttcatatttctcttccacagcactccaagcgactttaaatgctgttttctcagaatcatattgctcagaagcggagttaaatgcttctttaaaaatatcctgtgcgtggctcggtaaattatctttcacttgatctggcaattcacttttcgaattgtaaggcaattgaatcacgctccttctgtgtgatatctttacccaccgaaaaacggaactaaactattgttctttcttttcaatgaaaacttgatgcggaaatggaatttcaattccgtttgcgtcaagcgcttctttaatttctttacgaagctggcgctcgacaccccattgctccatgttttgcgttcggcacaatatacgaagtacaacatcggatgaaccaagactttgaacgccaaggacatcaggtccttctacaacagcttcattggtcgcagcaacattatcacatactttctgaatcacgcgaatggcttcgtcaatgttatcatcataggagatcccaatatcgacaagagcacgcatgttaccacgtgaatggttgcttagtgaactaatctcacggtttggtacgtagttcaatgttccatcaaaggaacggatatgggtggtacgaagtccgacttcctctacaattccaccgaaaccgcctgcagtgacgtaatccccaacatccatttgcttctcaagaagaatgaagaaacctgttacaacgtcacttacaaggccttgagcaccaaagccgacggcaagccctataatacctgcaccagcgattaacgctttaatatcaaaaccgaatgtttcgaaaataatagcaacagccataaagaggagaacgtacgtaaagatgctttttgataaatttttcagcgtattcgctcttccaggactcatgttttgtttctcagatacttgagtaaaggttctttcaataaatcggtttccgattgcttttacgatggcgtaaatgattaagatcgcaataagcttaagaataattatgcccgtagcaactaagaaaccttcccagttaatgttgtcaaataaatccaatagacttcctcctttaattatacctcaaacattatagttagcactcggtcaaattatagcgaaaattgtcatcataattcaagtaaagcgttaatacgcgacgaatgaaatgattttcgatatactaaaactaccctgtttagtacgcagtaaacgtgggtacgatagtgggggaaggtaattaacccacattaaattaattatcatttaatattgactaaaaataaatcgtgtactataatgtcatttgtgggcgaaagccgcaggatattttctaggagggatttacacatggtagaacgcatggtaggtaaacaagcacctcgcttcgaaatggaagcagtgatgacaaacaaagaatttggcaaagtaagccttgaagaaaatatgaagaacgataaatggacagtccttttcttctatccaatggactttacattcgtatgcccaactgaaattacagcactaagcgatcgtttcgaagaatttgatgatcttgatgcagaagtaatcggtgtatcaactgatacaattcatacacaccttgcatggattaatacagaccgtaacgataatggtcttggtgatcttaactattcactagctgcagatacaaaccacaaagtatcaaaagaatacggcgtattcattgaagatgaaggtgttgcacttcgcggactattcatcattaaccctgaaggtgagcttcagtactctgtagtgaaccataacaatatcggccgtgacgtagacgaaacacttcgcgtccttcaagcactacaaactggtggactttgcccagctaactggaagccaggtcaagaaacacttaaataaaattaaccaaccccagagagcacggctctctggggtttattttagtttaattaacctcatcatcttgaaaaaactccgcacagttaccgctcatttaaaaaattccgaattttaagccgaataggtggttatttatttcgaattccgatatattatgtatattgtcactctatttatcattacatactgtcaaaaggtggtgttggaatggaaacgtttaaaagattgaaagacttttattggccatataaaaatctttttctatggtccgtgttttcccttctatttgtaacaggtattaccgtcctatatcctatgcttcttcaattcacaattgatgacgtaattcttaagcaagaatacaaatgggttccgtatcttgcatttggttttataggaattatgatcgtgaaagggaccgctacattttttcaacaatacttaggagatctgtttggcgttaccgctgtttacaggctaagagaggagctttataaaaaactgcagtacttgccttttcgttattatgataatgcaaaaacgggagacttaatgtcgcgtttaaccgctgacgtagaaggatttcgctttttcttatcgtttggatttgctcaggtgatcaattttgttcttatcataagctttagtttaatcgtaatgtttagctattcagttccgctagctttcgttacgttagggatgctgccatttcttgcgattgtcgtttatcaatttgataagcgggtccatcctgcattccgtgggattcggaagtcgatggcacgcttgaatacaaaagtacaagaaaatattagtggcattaacacggtaaaatcgctctcaagagaagatttcgaaattgataaatttgtaaatagtaatacggattatcgtgataactacttaacaacgtcttatatttgggccaaattctttccgttaatggagtttatcggtaacttatgtgtcgtttttcttctatcttatggtggttaccttgtctttcaaaaccagctacagccaggtgaactagtcgctttctttagtttagtctggtatatcatctggccaataatgaatcttggatttgtcatcaataccttctctcaatcaaaagcgtcaggcgaaaggttgcttgaaattcttgatgagcctgaagacatttttgatctcgaaggcgctgttaacgttgaccgttttgaaggaaatgtagcatttaacaatgtaacccatcagtatgctgttgatgacgatgaagcgttaaaaaacatttcatttcatgctccgaaagggacgacgattggtttattgggagcaacaggagctggtaaaacgacgctcactcagctcattgcacgtttttatgaaccaaatagcggtgagatcatgattgatggtcgaaatattaatgagtatagcttgaaatctctccgaaaaaatatcggtgtcgttcttcaagaaacatttcttttttcgtcaacaatcaaagacaatattgcttatggtgatcccgatatctcgtttgaagccattcaggatgctgcaaaaagagcacaggcccatgactttatcatggaaatgccacatgggtacgataccgttttaggagaacgtggtatgggactttccggtggccaaaaacagcggatcgcgattgctcgtgcaattttaacggatccaagtattttaattcttgatgatgctacgagtgcagttgatatgcagacggaagtaaagattcagaaagcatttgaagaagtgatgaaagggagaacaacctttatcattgcgcacagaatttcttctcttaaacacgcagatgaaatcctagtattaaatgaaggagaaattgttgagcgcgggaagcatcaagaactgattgaacagaatggatattaccggagtatttacgatattcaataccaagatcgtaaggagattatggccaaacagactggttgaaatggggtgaaggcttgaagcaaaatcgaagagaacggttccattattcgcaggatacagcgattgaaaagcagtttaactggaaacagatgtcacgtctccttgggtatatggacccttacaagaaaagtttattaccaaaagcgattatttcaatgctgctatcaacagcagttcgactaatcgtcccgatcttcatcggggtcctgctgtttgatcacgcgataaagaatcaagatcaaacgttacttgtccaattgatttttggcatagcaggcttgtatttgctatcatggatcgccaatacgtaccgaattaaatggaccaatcagcttggtcaatacattatttatgacattagacagggtttgtttaagcatattcagagactttcccacggctttttcgataaacgatcggcaggttctattctcgttcgaattatcaatgatgtgaactccatgcaggagcttttcacaagtggcgttattaacttactaatggatattgttttattactagggatcattgtgattatgtttgttttaagtcctcaattaacgctcgctattatgatcattttgccgcttatgtttttgatctcaacgagcttaagaaaacgaatccgtcgttcctggcaagatgttcggatcaagcaggcgaaaataaattctcacttaaatgaaagtatccaaggaattcgcgttactcaatcctatacccaggaaaaaggaaacatggaatttttccagggtgtaaatcaagagaattacgcaagctggaaagatgccacgcaaaagagtgctatttttagaccgtttgttgaaatgtcaaatgcaattggaactgccattttaatttggtttggcgtatatcttattcaaaatggcatggattacggtgtattcgtaacgtttgctttctatctagggatgttctgggaaccaatttcccgtttagggcaagtttacaatcaactcctcgtagccatggcttcttcagaaaggatttttgagtttctagatgaacaaccaaatgtccctgaaaagaaaaatgcaattgagctcgacgagattaaaggagaaatcacatttgaaaatgttgaattttcctatgatgaaagtcgtaaagcgctccatgagttaagtttgaaaatgcaagcgggtgatacggttgcacttgttggccataccggttcaggaaaatcaactattgcaaacttaattagtcgtttctatgatccgaccagtggaactgttcgaattgatggaatggatttaaaagacgtgaaactcgatagtttgcgagagaaggttagtgtcgttcttcaagatacgttcattttttccggaaccattatggaaaatatccgttttggacgtccaagtgcaagtgatgaagaagtgattgaagcggctaaagcggtaggggctgatcacttcattcagcgcttaagtaatggttatgaaacagaagtagaggagagagggaacgttctctcggttggtgagaggcagctattgtcctttgcgagagcgctactcgctgatccccgtattcttattttagatgaagctactgcaagcattgatacagaaaccgagcttaaaattcaagaagctttgaatgtcgtcctagaaggtcgaacggccattatgattgcacatagactttctacgattcgtgaagcggataatatcatcgttcttgaccacggtcgaattctagaacaaggaaatcatagtgagttgatgcgtaaaggcggaacctactatgagcttgtaaagtcacaatttaatatgatggatgctgtttaaaaaagaagccttcttggcttcttttttttggatagagaataacgaaaggaaattttaataaatgtgaacagattattaacgaacagaaaattaatcgcactaaaaaagattgtgatacttgtcacaatctcagcgatgattcataataaaggtgtaaacaagaggttctctgtttctatgtgcaatgataagggaagatgagtaacagatgatgagaaattggtacaaaggggatgaacaatttggaactagattcagcgatgctaagtcgtcttttaacaagtctaacgttaggctttcacattatttttgcgacgttaggtgtcggtgtcccgttattaattagtctagctgaatggatcgggattaaacgaaacgatccctattacacgctacttgctcggaggtgggcgagaggttttgtcgttacagtagcggtaggtgttgtgacaggaactgctattggcttacaattatcacttttatggcctaattttatgcagttggcaggtcaggtaattagtttaccgctattccttgaaacatttgctttcttctttgaagcgatttttctaggaatctatctttatacttgggacaggtttaaaaagccgatttaccactggttaatttcaattccagttgtcattggctcaactttatccgctgtctttatttcaactgttaatgcctttatgaactccccgcagggctttgatatggtagatggtgtgcttaccaatatccaaccgcttgcagcaatgtttaatcctgcaacgccaacaaaggttgggcatgttgtgatgtcagcgtatttaacttctgcgatcgtacttgctgctattacagcgttccatatgttaaagggaaagcgaagtacgtattatcgaaaagcgctcaaattgacgatgacggctggttttatctttgcgatcggaacagctgtcattggagatttctcagggaaatatttagccgagtaccagccgagtaagctagccgccgcagagtggcattttgagacttctgaaaatgctgatcttgttgttggtggttttctagatgacgaaacgaacgaagtaaaatatggtcttgttttacctaatttcttaagtattcttgcccatggtgatcctaatgctgaagtaatgggacttgatcaagttccggaagatgaagtacctccgctttacatccactatttatttgatgggatggtcggcatcgggatgtttctggccgctttaacgttcttttttgttatcgctcttcgattaaaacgttttaataccgaaaataaatggttcttgcgattaatcgtgcttgctggaccgctttcagttcttgcgatcgagtttggatggattttctctgaagtgggccgtcaaccgtggattctttgggacataatgaggacgggtcatgctgctacgtctgcaaatggtgtaggatggatgtttgttctctttcttctcctgtatattgtacttggcacgctttgtgtaaccgtgcttagaaaaatgttcaaaacgaatccagctgaaaatgagctagaggaaattgctagaaggaaataagggctttcaataaaaggggtgaaaaaatggatattcaattacttggaatcaccgttctgtgggtttttctttatggctatctcattacagcctccattgattttggagcgggcttctttgcttattatggagagcttacgggacgcgaccacattattaataaaatcattagtcgttatttatcacctgtatgggaagtgaccaatgtcttcttcgttttctttttcgttggcctcgtaggctttttccctgatacggcctattattatggaacggctttacttgtaccaggtagcatcgccattattcttctggcgatacgagggtcattttatgcatttggaaactatggagcgaagaaaagccgagtttatacgtttttatatggggttacaggcttattgatcccagcttcactttcaactgctttaacgttatcagaaggtggatttattgaagaggttaacggagaagtaaaatttcttgccggagagctattttcaagcttctactcatggtctgttgtcctgcttgcgattgtatccgtgctctttattagtgcggcgtttctcacttactatgctagtcgggcgaacgatgagcccgcgcttgagctgcttagaaagtacgcgctgttttggagtgcaccaacaattctatcgagtattctggttttcgtagcactacaacaacataattccgtgcatttcgaacgaacgctagattatgcctggttctttattgcttcacttttttgttttttaattgcgacgtatttgattttccatcgtaaacgatatggaacagcatttattttcgtgatgctacaattctttttcgcattcttcgggtatggcatttctcacttaccatggattttatatgatcacattaccatttattcagggtatacgaacgaaacaactgggatatatcttgttctcgcctttatagctggtctttgcttactcgtgccttccctcgtgttattaatgaggctattcttatttgatgcagagtatgtaaaggggaataagtcctgaagaagaaatattgacactgatgataagagtggtaggatagatatgatagtgcgtcagcaatgtggctggcgcgcgtttctttctgaatgagtaggaggagtgtgcgttgaaaaagcaatttgccgttattggactcggtcgttttggaggaagcatttgtaagtcactaagtcagcaggggatggaagttcttgcgattgacatggatgaagataaagtgaatgagttttcttctgtagcgacacatgctgttatcgctgattcaactgatgaaagtgttcttaaaaacctaggcattcgtaactttgatcacgttatcgtagcaattggtgataatattcaatcgagtattttaacgacgttaattctaaaagaattgggcgtaagtaaaattacggtaaaagcccaaaatgattatcatgaaaaagtattaaacaaaattggtgcagataaaattgtgcatcccgaacgcgatatgggtgttcgcattgctcatagcatgatctcaaatagtgtattagactatttagagctctctgatgagcacagcattgtagagctgattgcaaactctagaatggacaataaaacaatcattgaattggatattcgagcaaagtatggtgcaaatattgttgcgatcaaaaaaggtgatgagattatcgtctcgcctcaagctgatcaaaagatttcaaaaggtgatattcttatcgtgattggttcagatcaggacattaatcgccttgagcgccaaattttaaatcgtgattaatcttcaaataaaaaacagcctgtcgaacgatcgacaggctgtttttatttgctcaaatttccataatgatcggaaggatcattggacgacgcttcgttttttcatataggaaaggtgcaagagtatctgttatttcattcttaatttcagaccactggcttgtacgcttttccattacgccattcagatgctttgataagagctcttgagcatcattaatcaaatcaccggattctctcatgtagacaaatcctcgagaaatgatgtcaggaccggaaagaattttaaactctttcatgttaatggagacaacaacaataacaagaccttcttcagaaagaattttacgatctcgtagcacgatgtttccaatgtccccgattccttttccatcgacatagacagatccagaaggaatcttaccactaatggaagcttcattttcgcttagcgcgagaacttcaccgttatccataatgaaagaatgatcctgcggaatgccacaatcttgcgcgagctttgtatgcatcttaagcatgcggtactcaccgtgaattggcataaagaatttaggcttaatgagacgaagcataagcttctgctcatcttgaccaccgtgaccagaagtgtggatgtcacttagtttatggtgaatcacatcagcacctgcgcgagatagttggttaatgattctcgatacacttacctggtttcctggaataggtgaagaagagaaaacaactgtatctccaggaatgatttgaatttgacgatgtgtcgcgttcgcaattcgagatagagcagccatcggttcgccctgacttcctgtacaaagaatcgttactttattttctggaagacggtttatttgattcgcatcaataaatgtgtccttaggtgcattgatgtacccaagttcctgaccaatcgtaatgtttgattccatactgcgtccgaagactgctactttacgtccgttttcaactgctgcttccacaacttgctgaaggcggtgaatatttgatgcgaaagttgcgaaaatgacacgaccatctacttttctaaagatatcctggatcgtttccccaacgcgactctcagacattgtaaagcctggcacttcactatttgtactatcagaaagaagcgctagaacgccttctttaccgatttcagccattttagttaagtttgctggttcgccaaccggtgtgaaatcaaacttaaagtctcccgtatgaacgatgttaccaggaggtgttttgacaacaacaccataggaatcaggaatactgtgagttgttctaaagaacatcaccgatgttttacggaacttaatgatgtcttcttctgtgatttcatttaaagaagcacctcgaagaagtccgtgctcttcaagcttattgcgaataaatcctaatgcaagcttaccaccatagattggcacgttaatttcacgaagtaagtaagggatgccacctatatggtcttcgtgaccgtgagtgataaataaacctttgattttatcctggtttttaacgaggtaagaataatcaggaataacgtagtcaattcctagtaattcttcttctgggaatttaatcccagcatcaacaaggataatttcatcctgaaactgaataccgtacatgtttttaccgatttctccgagtccacctaaagcgaacacggcggtttgatgatttttaacaaatttcatagtctatacattctccaattcaaagtgctctgatttttgctcaaacgccaggaagtcatcttccacggtttgaataaactcaatattaaggtcgcggtcctttaatttgtagcgaacttcccgttcagaagtagcctctacgtaaaggctcattgttcgctctcttacagggacctccttttttgtctcttgataaaataccttataaatcattctaaatctctccttaactcagacaatttgtgtgcatcttcgtttattatataggaaattggtttctttttcatgtttctaatcacatttccataagaaataggagaatttgcacgaatttaaggctagaaaaggttaatcaatggaatatttaggttgtggaaatagcacgttcctccaggttttttttaatttacgcttcatttttcgatacattaagctcatccttcctttttttataactatttttattattgatcatggtgttaagaattagtttggaaaaagatggaggaatagtagggacaccatttccttaatcatgtaacatgttaatgaattagcttataaggaggatgagatttgaagttatatgttgcgcttatttcattgagtttaatatggggcatgtcgttcatgttcattaaattgattgttccgattacggggccatggggcgtagtattttttcgctgcttacttggcgctgtatcgatttttctttacttaataataagaggaagattaaagaagttaaaaggcaatcttaagtggggaagtcttattttagtagggattatgaatgcgctcattccctggggaatgattgcgcttagtgaagaacgtatttcgagtagcctggctgctacgttaaatgcgactacaccactatttacaagtattcttggcgcttttttattcgggcgaatgctattactaaaacagtggactggtattatcgttggatttattggcatcctttttttaattgaccttgatccaagtgcattggtaaaaggtgagtggagaggggtttttccaatgctaattgccacatgttgctatgggtttgcttctcaatatacaaaaaagaacttaaaaggcgtacctgttgatgtgttgtcgttcattacattaacgatcggagcggcaggagggcttctaatgatgctcattagcggggaaggtggtattcagtttacgttactccttcaacgtgatattctaatatcgctaattggtctaggtgtgtttggatcgggtcttgcttatttgctcttctattatatgattcaacatggtagcgcagagtttgcgacattagtgacataccttgtacctgtcaccgccttgatctggggaagcctttatttaaatgaaaacattacactacctatgattgttggattgctacttgtgttttttggagtttatttatcgggtaaacatcaaagaacggaagcaaacacgataagaaaatcagcataacgtttctcaagatagttatagtaaaaaatagcggaaacaggtgaatgaagatgcataatgaaaagattgtattttttgatattgatggcacacttcttaatcatgacaaaaaaattccaaagtcaacgcgggaagctttaaaaacacttacagagaatggggttcatgttgccattgcaacaggtagagcgccttttatgttcgcagatcttagagaagatcttggaatagacacgtttatcagttttaatggacaatacgtgaagcaccaggacaaggttgttcatacaaatccgctaagccgagatgaaattaaagttcttgaagaagaagccaaaaaaaatggccatccaatggtattccttgatcatgaagcgatgatgagtaaccatgatgaacatcctcatattttgaaaagcatggacgacttaaaaatgcattatcctggatatgatccttcctattatcacaatagagaaatttatcaggctcttctgttttgcgaaagtaatgacgaggggggctatcgtgatgcttatggaaaccttgattttatccgctggcatgattattccatggacgtgattccacctggaggctcaaaagcgaaagggatagaagctatgattaagcatcttggatttaaacgagaaaatacgtacgcttttggagatgcactaaacgacatcgaaatgttgaagtttgcaggcacgggagtcgcaatgggaaatggatatcaagaagtgaaagaggtggctgattacattacggatccagtcgaccaaaatggtattcaaaaagggctgaaaaaagtaggcttattataagaaaagggatcgcctattgaaacggcgatcccttttcttattgtagaatcaagcttatcggcctaaaggtgttaattcacttgcttcttcattgttaatacgatcgtaaaacataataccatcaagatgatcaacttcatgttgtacaacgatagcaggcagcccctttaatcttagctttagaggattaccttcagcatcaaccccttttactgtaatccgagcatatctcggtacagcaccaggcacttcacgatcaacggatagacagccttctcctccatctaaatacgttttttcaacggaatggctaatgatttttgggttcataatgccatagctatatagcgtgcctctatgatcagatacgtgcaccgcaatcatacgtttgctaatgccgatttgtggtgcagcaattccgatacctgagcgtaattcatactttaaggcagcttcaggatcttgactattaataagaaattcaagcatttctcttaaggtttgcttttcttcttcagttgcaggaagggcaatttcatttgcaacttcagttaggattggatccccttctctacgaatatttttcattgttagcatgttatgtttcactcctattcaaaacggtctatcataagtatattcaactttttgtaagggttaaagcaaatgctcttttactagtggatgattatcgatactttgaaaaagcaagcaaagcactcatcaccgtaaaatgagaaacttacaacagtgatagtttagcacaacacgatttatcagggaatcctcttggatgacctgtttagaaagaatatgcgtaaattgaagcaatgattgaaaatggagtattctattgagatctgtattatggtatagtaatcagggatgtaattattatggtatgaattggatatgtggggggactttttttgctacgtaaatatcgtttaggaattatttctctttttttctgttttctaatggttgggttagctggttgtcaatttggtggtagcccagcagaaaaaatgtatgaccatttagaggaagctgttgctcttgaagatcaatttagagaacaacaagaacctttggcgaaggcagagaagaaggagcaagacatttataatgaaattgttgcgctaagtatggaagagtttgataagattgaaaagctttctaaagaagctgaagaaaatacagatcagcgacttgagtacttaaagaaggaaaaagaaagcatcgatgaagcatatgaagagtttgaagaggttaaagatttaacagaggaccttgaaacggatgcagctaagaaagatgccaaaagcttgattgaaattatggataagcgttatgaagcttatggaaagctacataaagaatacaaagcagctgttgaacaagatcaaaagctctacagctcactacaagataaagaactaactttagagcaactccaagaacaaattaaagtcgttaacgagaaatatgccaaggtggctgagcataaagaaagtttcaacaaattcacgtctgaatttaatgaagccaaaaaagctttttatgaatcagctgaattaaatgttaattacggggaatagaaaccgctcatctgagcggttttttctatgtaatttgaaatattttgaccgcgcgatcgtttgtatgaatcaaaagagaaagcatttttataatgaaatttgaagcaatctctcgtgataaagagtcataaaagatctgccctcctaattatttacactaatacagtctgtcaaaacagaatgtaacagttttaatatcattccttaacatgcaatttgtaaatcaattaattgacttgaaacttactgtattgtaaacttaaaaacgaacttactcatgaagagaagcactcccttattcttactgatacagactattattcgcagtaatacatagcactagggattatttcttcagaattaagggtatgacattgagtgttgtcttaagtaatgcaaattaatgaatggtatttgtcatttaataacgttgaaatggacatgctagtgatgtctgtaaactgaacgacccactcacaattgcaacatttgcaattcaataatctatctctttatgaatgaaaggatgaggtgaaaggtatgggaactaaaaccatcgaaaacatcgaaggccaattcgaaatgttccagattctaaatgaaaatggcgaaatcgttaatgaagaagcaatgcctgaactatcagatgagcagcttcaagaattaatgcgccgcatggtgtacacacgtattcttgatcaacgttcaatctctttgaaccgtcaaggacgtcttggcttctacgcaccaactgcaggacaggaagcttcacaactaggaagtcaatttgcacttgataaagaggactggattcttccaggttatcgtgatgttcctcaaatcatctggcacggtcttccactatataaagcatttttattctcacgtggtcactttgtaggaaaccaggctgatggtcttaatgtattgagcccacaaatcattatcggtgctcaaattacacaaacagctggcgttgcacttggacttaagaaaaaaggcaagaaaaacgtagcaatcacttacactggtgatggcggtgcttctcaaggggatttctatgaaggcatgaactttgcaggtgcttatgctgctccagcgatttttgttgtgcaaaacaaccgtttcgcaatctcagttccagttgaaaaacaatctgctgcgaaaacaatcgctcaaaaagcagttgcagctggtattcaaggtgttcaagtagacggtatggacgttcttgctgtttataaagcagttacggatgctcgtgagcgtgcgattaatggcgaaggcccaacactaattgaaacaatgacttaccgctatggtccacatacaatggctggtgacgatccaacacgttaccgttctgaagatcttgatagcgagtgggaaaagaaagatccaatcgttcgtttccgcaagtatcttgagagcaaaaacctttggtcagaagaaaaagaaaatgaagtagttgataatgcgaaggacgaaatcaaagcggctattaagaaagcagatggcactcctaagcaaaaagtaacggatcttatttctaacatgtacgaagagcttccacagaaccttcgtgaacaatacgaacaatatagtgcaaaggagtcgaagtaagctatggcgcaaatgacaatgattcaagcaatcactgatgcgatgcgtacggagttgaaaaatgacgagaacgtactcgtgtttggtgaagacgtaggtcaaaacggcggcgttttccgtgcgacagaaggacttcaaaaggaatttggcgaagatcgcgtgttcgatactccgcttgctgaatcaggtatcggtggtatgtctatcggacttgcacttactggattccgtccagtaccagaagttcaattctttggtttcgtatacgaagtaatggatgctatttctggtcaaatggcacgtcttcgttaccgttcaggcggctctttccacgcgccgattactgtacgctcaccatttggtggaggagttaaaactcctgagcttcatgcggatagccttgaaggtcttatggctcaacagccaggacttaaagtcgtaatcccttctaacccttatgatgcaaaaggacttctaatttctgcgatccgtgataacgatccagttattttccttgagcacatgaagctttatcgctctttccgtcaggaagttcctgaagaagagtacacaattgaaataggtaaagctgaagttaaacgtgaaggtactgacatcacaatcgtaacttacggtgcgatggttcaggcttcacttaaagctgctgaagagcttgagaagaacgatattagtgcagaagtaatcgaccttcgtacggtgagcccactcgacattgatacaattattgcttctgttgagaaaacaaaccgtgcaattgtcgtgcaagaagctcaaaagcaagctggaattgctgctaacgttgttgcagaaatcaatgaccgcgcaatcctaagccttgaagcaccagtacttcgcgtagctgcaccagatactgtatttgcattctctgcagctgaagatgtatggcttcctgatcatactgatattatcgaaaaagcaactcaagttgttaatttctaattaactctttataaaaaacatgaagtgaagctgcgatccgcgcttcgcttcagatcttatatgagcaaaatttttctacaattaggaggcgaagtcccgtggcatttcaatttaagatgccggatatcggtgaaggtatccatgaaggcgaaatcgtaaaatggtttgttaaatccggagatgaagttaaagaagacgatattcttgcagaagtacaaaacgacaaagctgttgttgaaattccttctccagtagacggaacagtgaaagaagttcacgctgaagaaggcgcaactgtaatcgttggagacgtagtgattactttcgacgcagaaggttatgaagatgcagaagaagaacctgcagctgaacagcctcaagcggaagaagaagctcctaaagcggaagctaaatcagaagcaaaagaagatagcgctggatcaaaaccacttcctgaagatgaagaagaaacagatccaacaaaacgcgttatcgctatgcctgcagtacgtaagtatgctcgtgaaaacggcgtaagtatttctaaagtatctggttcaggtaaaaatggtcgcgtcgtaaaagaagacatcgacactcacctaaatggtggaggcgaaacggcttctgaagctccagcagcgtcagaggaaaaagctgaagcgaagcaagaaacggctactacatcagctcaaccacaagcatctgcacagccggaaactcgtgagaagatgaaaggtatgcgtaaagcaattgcgaaagcaatggttaactcgaagcatactgctccacacgtaactcacatggatgaagttgttgtaacagatcttgttgctcaccgtaagaaattcaaacaatatgctgcagacaaagatgtgaagctaacttaccttccatacgttgtgaaagctcttgtttctgcacttcgcgaattccctatgttgaatgcatcaatcgatgattctacagaagaaatcgtacacaagcattattacaacatcggtatcgctgctaacactgacgctggactagttgttcctgtcgtaaaagaagcagaccgtaagccacttcttaatgtttcatctgaaattaatgagttggctaaaaaagctcgcgatggtaaactatcaggggacgatatgaaaggtagcacatgtactatttctaacctgggttctgctggtggtcaatggttcactccaatcatcaacaatccggatgctgctattcttggtattggtcgtattgaggagaagccagttgttatcgacggagaaatcgttgctgcatctgttcttgctctatcgatcagctacgaccacagacttattgatggcgtaacagcacaacttgctcttaatcacatcaaacgtctgttgaacgatccacaactcttaatgatggaggcgtaataatatggtagtaggagattttccaatcgaattagacacacttgtagtaggagctggaccaggtggctatgtggctgcaatccgtgcagcacagcttggtcaaaaagttgccattgctgacaaaggcactctaggcggagtttgcttaaacgttggttgtattccttcaaaagcaatgatcaatgcgtctcataaatatgagtctgcaaagcactccgatgatatcggaatcacagctgagaacgtgagcgtcgacatgaaaaaagttcaggagtggaagtcttctgttgttgacaagcttactggcggcgtagcaggacttatgaaatcaaataaagttgatgtaatcagcggtgaagtttatttcgtcgataagaacacagttcgtatcatggacgaaaagaactctcaaacgtatacattcaacaactgcatcatcgcaacaggatctcgcccaatcgaacttccaagcttcaaatggagcaagcgcgttatttcttcaactggtgcacttgcacttgacgaagttcctaagaaaatggttgttatcggcggaggatacattggaatcgaacttggtactgtgtatgcaaacttcggtactgaagtaacaatccttgaaggtacgaagcagatcctacctggattcgaaaaacaaatgagctctcttgtttctcgtcgtcttaagaagaaaggtaatgtagaaatcattactcaagctcttgcgcaaggcgttgaagaaacagaagacggcgtaacagtaacagcagaaatcaaaggtgaaacgaagacgtttgacgctgattatgttctagttacagttggccgtaagccaaatacaaatgaaatcggtcttgaagaacttggcgttgaaatgacggataaaggtcttgtgaagatcgacaagcagtgtcgtacaaacttcgataacatctatgcaattggtgatatcgtagaaggtccagcacttgctcataaagcttcttatgaaggtaaagtagctgcagaagtaatcggcggtgaaaactcagtaattgattaccttgcaatccctgcagtggtattctcagatccagaactcgcttcagttggttatactgaacaagaagcaaaagatcaaggattcgaagtgaaggcatctaaattcccattcggcgctaacggccgtgcattgtctcttaacgacagtgaaggatttatgaagcttatcactcgtaaagaagatggcctagtgatcggcgctcaaattgctggtcctaacgcttctgatatgattgctgagcttggtcttgcaatcgaagctggtatgacagctgaagacattgcactaactattcatgctcacccaacacttggagaaattacaatggaagctgctgaagtagctctaggtactccaattcatattggttaatttcttattaaaaacttcggagacactaggtctccgaagttttttttgatgagcgaaacttgttttagaattgattgaggaagagaagcaatttttagcgataagaggacatacatataaatagaataattgcttctagtagaggtggtgtggaatgtattgaaaagtactttgctttcagttcatgatctggtttgctttttttcaaatcattcatcattctccacgtgatccaattggatttaagattgtattgtttctcgtttttctctatctgatttgtacgatttcaatacaaatggtgaagagagggaaggagcttctttttctcatttctttctctacaacaattgcattagtcattaattatttctatatcttaatcatatgagttgtagtccatacaaaagcgcactaccaatttggcagtgcgcttttattattttggctcatcttttttaggtggtcttgacggtattttctcttgtttaaaagcttttaatagagagataaccataccgatgatgataatagcaaacgggaaagcggctatgatagacgcagtttgcagggcacccaggccacctgaccaaaggagaactgcagcagcagatgactgaatcacaccccaagttaatttcactttggtagaaggattcatacttccgttcgtcgtttgcattccaagaacaaatgttgctgagtcagccgatgtaataaagaaggtactgattagtaaaatcgcaatgatcgacatgatcgtaccaagtggatattgctctaatacagcgaacagcgcaacttccataccctggttgttaataatgtcgtaaatacctgttccggccatatcaagtgaaatggctgaacctccaaacacggagaaccataatccaccgaaaatagttggcactaaaagaacgccaagaacaaattctctaatcgttctaccttttgatacacgagcgataaaggttcctacaaatggcgcccaggcaatccaccatgcccagtagaaaattgtccagctttgaatccatgatgacccttcaaatggtctcatacgaagactcatgctaggtaaattttgaatataagaaccgagcgttgaagtaaacagatccataataaagtttgtcggtcctgcaaagagtaggaagaacataagcaatatcgcaaggacaatgtttgtattacttaaatatttaattccttttgaaattccagttgaagccgagatcatatagagaactgttacaatcaaaataatgattaactgtgttgtaaatgaattttcgatccctgttaaataagaaattcctccaccaatttgtgaagctccgaatccaagtgaagtagcgacgccgaatacagttgcaataactgcgatcacgtcaattaatttaccgattggcccatttacccgctctccaagaatcggatagaaaatggcactaataaggcctggtgcaccttttctaaatttaaagaatgctaatgctaaagcaacaactgtataaatgccccacggatgaagtccccaatggaagaaactatattggaatgcaagtcgtgctgcttcatctgactgagaagctgcgccggcaggtggatcgtaatagtggaacattggctcagcaacgccccagaatacaagtccaattcccattccggctgagaataacattgcgaaccatgtaattagattatactcgggtacatctgtttcttttccaaggcgaagtctcccgtacttcgaaaaaataagatagatcgcaaaaataagaaagcctgacgctgctaataaataaaaccatccaaatttcacctgaataaaggtttgtagtgaagatgttgttgcgtctaaagactctggagaaatggacccccatgaaataaagataagagataatactacagagattataaagactgctgtaagcttattcaaatttcatcatcacctttctgaataattaactgtactttcatccgaaaagcttttttaataaatcagaaataagatgcatgtgtactcaatttcacctgtcgttaccaaaactatgcaacgagcaccctatttcctattattaacaggctttgtaacggatcgcgaaatttgccacgttgtctagtatatttgttgaaatcaacgttgtaaaggaaaataccatgtcagagaggtagtcagaattgtaggataatgaaaaggaatttgttggttaaatgtgacattcttctctttctcctcctccataattggtttatgatgaaaggagactacataaggagagagagaaatgacaaatacgttaaaatggatgatgttggcaatactgctttttgcagctgcttgctcaacaaatgcaggaacagaaacaaataccgatgcatcaaaaaacgaagctagtaatagcgaacaggcgccaaatgagcaagaagcgagcgatgactcttctaatgaagaagcaaattcaaaagagtcgagtgatgctgaacaagaggagcagaaagaggaagaagaggccactgctgaagagacagagcctgaatatcgtttgaatgaggcattttggggatttgaaccaataaatgatgctccggctgaagcagtgcttcttacaatcgatgatgcaccagataaaaattcggttgaaatggcaaagacgcttaaaaaccttgatgctcctgcgattttctttgtgaatggtcactttattgatactgatgaagaaaaggctagattaaaggaaatatatgatatgggctttgcaattggcaatcatacgatgacacatgctgatttgaaatctttatctgaggatgagcaaagggaagagattttgaaattaaatgagatgattgaagaagtaattggggagaagccgaagttttttagagcgccattcggatcaaacaccgattattctaagtcactagctaaagaagaaggcatgcttgtgatgaattggacgtatggatatgattgggtaaaggaatatcaaaataaagctgcactagctgacattatggtcaattcaccacttctacaaaatggagcaaacttgcttatgcatgaccgtgattggacagctgccgccatgagtgacattgtgtccggtttaagagataaagattatgatctcatcaatccagaaaaaatagaaacagttaaaaaataaacagccatttggctgtttatttttttgcatatcgcattttccgaccattaaaaaggatgagatctgctttcagttttgtagcaagaaatttacatagttcatttgctttagctttatcaccatgagtcgaatgatcaggtagaacaatctgtatccttttctcaactagaccaattacaattgtacggtaagcatcatttttgcctcttaaataaaaccatccatcagagtcagcattttcaacaagtgtataaggaaaagcaaagtcaccatacgaccaggaaagctgttctccagttttcgaagtaatgttcatgtaataagtgagcagttctttaacgtgaatgagtgacagatcgtctgttattggagtaagataagcgctttgtggcatcaaatcctcctttcttcatccccattagtttacaggcaaattggttttctgacaattagtagtttagaacacataatagcgcaaaaagaatataatgtgatatacaatatagtgttgacaaaacaattgtgacacactattatggaattaagcgaaacggaagcgttttcaaaactaacttaaggggtgttgagaatgggtattatcatttgccaaacttgcgaaaaaacgattgatcacgttcatgaagagaaggtaagcacactttatagcagatgtccggaatgcaataagaaagataaaaaataattttgataagacaaagaggcggccatatggccgcctcttatttaattgctttgtattctttgatcacacggatgtcgtttaattcatcatcttcgggtccttgaacaggaagaccagcttcaatattttccacaatataattcaagttttcttccgtaatgatttcaccaggaataaagattggaatgcctggtggatacaccataacgaattcagctatgacgcgccccgctgactcagtaaatggaataatttccgtttcggaataaaaagcatcccttggagaaacggctagtgtcggtatatctggagcatgaacgtcaaacttttcagtaactgtaccatctgattctttaaaagcttctaccatatcttttaaggcgtatacgagcgcattaacggattcttcattatcacctggtgtaacaatacaaagcaagttatacaaatcggaaagctccacttccaggtttgcctcttttcgtaaccatacttccgcttcataccccgtaatccctagatcgtggacagagataatcagttttgttggatcatagtcgtatgtggcattcgttcctagaatttcatttccaacacaatagagtggtgagatatcattaatttgattccttgctcggtctgctagctgtatcgcattttctactaattcgtacccatccatcacgagtctcttccttgcaacatcaagagatgcaaggagaatataagaagtagaagttgttgtgagcatgctgataatcgtttgtacgcgcttagcagagattaagccttcttttacatttagtacagagctttgtgtcattgatccgccgagtttatgaacgctagttgcggccatatctgcacctgcttgcatcgctgaaactggcaagcgatcatgaaaatgaatgtgaacaccatgtgcttcatcaactaaaacgggaacgtcatattcatgagaaattgaaacaatttcttctaaattcgcagaaatcccaaaataagtagggttaatgacgagaacgcctttagcatcaggatgctgttcgagcgctttctttactgcgaccggggtgatgccatgagaaatgccgagcttaggatcaatttcagggtgaatgaatacgggcgtggcgcctgaaaagatgatggcagacatgaccgatttgtggacgtttcttggcacgataattttgtcaccaggagaacatacggtcataaccattgtcatgatcgcgccacttgttccttgaacagagaaaaatgtggcatcggcaccaaaagcttctgctgcaaggtcctgtgcttttttaatcatgccatgcggatgatgaaggtcatcaaggggctgaatattaattaaatcaatcgaaagggcgttatcgccgataaatgcacgaaattcaggatccatcccatttccttttttatggccaggaatatgaaattgaattgggtttttatttgcgtggttaactaaaccagtgaataatggtgtttcgttttgttgcaaatcaagcacctctttatttatactttagtacagaaagcattccacaaaggtttggggaatgcgaatttgatcttgaatgagctgtcgcgaatgggaaaaggtttattgttccgtcacatcgacctttttcatccttaaacaaactgagtataatcacataagtactattttgcaagttttattttgatgctaggtcagttccaaaaaaggagatcctctcttattctcgaaatggattatgtgaaggagaggataactaatgaaatggaagacgcgacttacggagttattaggtataaagaaaccaattgtacagggggggcttgcctaccttgcctatcacgagttagcttctgcggttagcaacgccggggggctaggtcagctcacagcaatgtctatggatacagaaacacagctgaaaaaggaaatacaccttactagaaattttaccgatcaaccgttcggagtcaattttgcaattggccagcacgggaggccatttgaacacatgcttgaaactgctatccaagaaggagtagaaatcatttccgttacgggtggtaatcctaagcctgtttttgatatggtgagagggacaaatgtgaaagtccttgttttaacagctgggaaacgacaggccattaaggcggaagagctaggtgcatcagcggtcatggttgttggtcaagaaggtggcggacatctcggaaaggaagatacagggacaatggttctcgttcctcaagtagttgatgcagtatcgattcccgttattgcatcaggcggtataggagatgggcgggggttaatggcctctctcgcacttggcgctgaaggaattgaaatgggaacaagatttattgctacgaaagagtgtacacacgctcatgatgcatacaaacatcgtttgttacagggatccgagacggatacaatgattattaagcgaagtcttggtgcgcctgctagagtaatccgaaatgtttttagtgagcgaattaccgaaattgaagcaagtaatggtggatatgaccttctgaaagaatacataagtggtgaagcgaacaggaagtttatatatgaaggaaaagaagaagatggttttgcctgggcaggacaagtgatgggagcgattcatgacgttccttccgtacacgagttatttgaacggatcgatcaagaagcaaatgagattcgaataaaatggcaactttagagaggggttaaaaaatggaagttcaatatcctatttccattgattggagtaaagaagaagttattaaagtaattaatttttttgagttaatcgagaaagcgtatgatcaaggtgttcataaaggtgaattaattagtagctatcatgaatttaaagatgttgttccttctaaatcggaggaaaaacaaatctttaaacagtttgataaagagacaggcttttcaacttaccacgttgtcaaagaagcgaagcaaacagaacatgatcgagtaaaaatggcaaaataaaaaccagggggataacccctggtttattttgtagattgaagtgaaaggtgataaaacggcatgagcgtttcaaacgttttgttaacttcttgaataaattgttccccgtcttgcaacagtgggtcattgttcgtaaagtggcgtccaatgagaaattcgccttttttaacatcacggaagcgggtaagaactttatcgagttcaacatccgtgataggctgacttgcttttttctttgtatgatcagttgaaatccaataggatgctggaatgtcattttgaagattgtccatatggtctaaaaataacgtagccatttgtggttttccggggagctcataaatgtaagcaagccatacaaaaacatgatcatcaaataggccaatttgaaagtgaggatgcattttgtatccgcgtttattatgagaaaatgccatccacgtatcaactggtgggttctttgttcttcgtgcatgacgtgcaatgtgaaggtgcatttcattaccggcaagaatttctaggtcacttttcacgtcatcgctgatcgcctgaaattttggctgaattctttcctgaattgcttccattcttgcatcaagtccttcgatttggaaggcgttaaaatcgtgttgagtaaatcccttaaatgacataatatcctccattgcgacaaaattttatacgtttatagtaacatagaactgcaatttatatgaaaactgacgatcgatgtgtaaggataggtttgaaaaataagcaaaagaggaaaaatagtaacaaataaagaggttgcatagtgagcagggaaggcataagatatagtaatcaaagcagaaatatcagaatattccgtcttataaggtttctctgataactatgactgcttactcgaaaagaagaggggtgtaggttaccatgaaacaagtgattcagtcattacaaagaaatgaagcagagaagcggattccggtattgagaatggagattgactatgagctggcaacgctacacgatgcaatgacggctagtgatcaagatgaaatggcgagatgtaaagtgaagcttgaagaacttcgtaaagaaatggttagattggaagcgtagcgaaacgaaccttgcaaaaaggttcgttttttcttcttttcctgtcataataagaaatagaatgaaatataaggtaaaaggagatcgaaccatgacacagcagacgaactggaatcgcgtatatgatgataccattaaatggattagagaagcgggaaaagaaatcatgtcttcctttacaacatcttttaacattgagtcaaaaagtaatccgaacgatctcgttacagacattgataagcaaacagagaaattttttattgagaaaatcaaaagtacttatccaaatcaccgtatcatgggtgaagaagggtttggagataaaatagaaaatttagatggggttatttggtttcttgatccgattgatggaacgatgaattttgttcatcaacaaaccaatttcgcgatatcgatcgggatatacgaagatggagtagggaaacttgcttttatttatgatgtaacaaaagacgagctttatcattgtaaaaagggctcaggtctatacctcaatgatacacaagtaaaaccgttgcagtcgacgaatctttcagaatccctattagctataaatgcaacgtgggtcacggagaatcatcgtatcgatccgcgcaccttctcaccacttctaaaaaaaataagaggcacacggtcttatggtagtgctgcaattgaaatggctttcgtagcagcggggcgtcttgatgggtatgtctctttgcgactcgccccgtgggattttgcggctggtaaaatgttaattgaggaagcgggaggtgtttgtactacggtggataataaggagattgatttgttggataaaaacaccatctttgtcggtactccactgtttcattcacaggttcaaaaagaatatatccaaccagcgcttgataaaaacttctatttaagaactccttcaacaaaatgaaatacgtaacttcaacaagcaaggaaaggttcgccaacctccttattgaatggacaatggaagataaagattggcttgatgaagaatttgggcgactgccaatcgcagaagatatgctttcatatatacaaacttatgaaggaatgggatgtgaatttaggctttggtttatagatgaagaacctgtagccattacagccgttcttgatcaggctccatcaaatcaaaagtcctggttaggtacgatcgtagtcgatcctgcccagcgaaaaaagggagtcggtcaagacgttatacactttatagtaagtgaaaaagaagaggttgtttttgctggcattcccttggagcggaatgagtggagtttgtttttagggaaatgtggatttgaacaatacgccattgaaggtgaagaaaaaaagtatttaatttttgttcatcctaatgagggataaatgagcttcaaaaaagagctgttcatggtgaacagctcttttttgatcttattgttcagctttacgtttaattcgaaaacccattcccataaagaaacctactccaataaatgaaagaagtccgccgatccagctttgttcagctatagaaataccgattgcacacatgcttgcaaccgccagaatggccattaagagtaaaaggaattgatgcttgttcatgcggaaagccccctttatagtactagtgtacaataacagggttaaggtggaaagaagagaaatttcgcctaaagcgatatctgtgttataatggtctagttattgagtttatcgtcagaaataagacgagaatacgaggagagaataattaatggcaataagagaagatattcgtaacatcgcaatcattgcccacgttgaccacggtaaaacgacgctggtagaccaaatgcttcaccaatcaggtacgtttcgtgataacgagcaagtaagcgaacgtgcgatggattcgaatgaccttgaaagagaacgcgggatcacaatccttgctaaaaatacggcaattaactatgaagacaaacgaatcaacattatggatacacctggtcatgctgactttggtggtgaagttgaacgtatcatgaaaatggtagacggtgttcttctagtagttgacgcttatgaaggctgtatgccacaaacgcgtttcgtgcttaagaaggcactagaacagaagctaacaccaattgtagttcttaacaaaattgaccgtcctgcagcacgtcctgaagaagttgtggatgaagtcgtagatttatttattgatcttggcgcggacgaagatcagcttgacttccctgttgtctatgcttctgcaattaacggaacggctagccttgatcctgaagtgcaagatgacaatatgaaagttcttatgaacacaattattgataacatcccggcaccaattgacaatagtgatgagccacttcaattccagatcacacttcttgactacaacgattaccttggaagaattggtatcggacgtgtgttcagaggaacgatgaaagtcggccaacaagttgcattgatgaaggttgatgggacagttaaacaattcagagtaacaaagctctttggtttcattggcttgaaacgaacagagattgaagaagcaaaagctggagacctcgttgcagtatctggtatggaagaaatcaacgttggagaaacagtttgtccatacgatcatcaggaagcacttcctatcctgcgtattgatgagccaactctacaaatgacgttccttgtaaataacagtccttttgctggtaaagaaggtaagtacattacaagtcgtaaaattgaagaacgtcttagagcacagcttgaaacggacgtaagtcttcgcgttgagaacacggattctccagatgcatgggttgtatcaggacgtggtgagcttcacctttcaattctgattgagaacatgcgtcgtgaaggatttgaacttcaagtttcaaaacctgaagttatcgttcgtgaagtagacggtgttgcaagtgaacctgttgagcgcgttcaaattgacgtacctgaagactacactggttctgtaatggaatcacttggtgagcgtaaaggtgaaatggtcaacatggtgaacaacggttcaggtcaagttcgtcttgaatttatggtacctgcacgtggtttgattggttactcaactgagttccttacacaaacacgcggttatggtattattaaccatacattcgaaacttatatgcctcttattagcggccgtgtaggtggacgtcgtgctggtgtacttgtttccatggaaaaagggaaagcatcagaatacggcattatgggtgttgaagatcgcggtacaattttcgtagctccaggtactgaagtatacgaaggtatgattgttggtgagcacactcgcgaaaatgatattactgttaatatcgttaaagtgaagcaaatgactaacatgcgttctgcaaacaaagaccaaacggtttcaatgaagaaacctcgcgttctaacgcttgaagaagcacttgaatacttgaacgatgatgagtattgcgaagtaacgccggattccatccgtcttcgtaaaaaaatccttgataagaacgaacgtgaaaagcacgctaaaaagaagaaaacagcccaataagggtgtctaatgcgattcaaaaggggcatcccttttggatcgtttttttattgttttacaaatcgtatctttctctgtcctatataggactttttttctaaatggaaagaaatcgtttacttttatttgtgatttcatttattatgcttttataccgggggtggaaaagtgaatacagaacctactatacaatctgaagatttatcttttttcgctaagttagttggcattgaagacaatatgacgatgggattttatttgctatatgcgattattgttatcctttgtattgttgtttatcgtcttggctttgccaaaaaactaccgatccttaaaaacgttatcgtatacgctgttcttgttatagggtgttttccgctaaccttttttggaataggtttgcctgttgctgaaggattagtggcttctgctgtcgtattaattatttataagatgcgactcaaccagtcgaagaaaaaagaggcctaacgtcaaaggagggaagctttgaaccttcaggatgcaatgtacaattggctcagtattaaagttgtggcgaatcaaagacaggacgatcaggcggcgcaagatacgtatgaattctttcatgacatattaacggaagatcatctagtctcggatttgagtgtggaggtgtcacatgaatattacgttgtacattatcgacaaaatggagaagaagattcaaagaaatttcctgttgaattaatcgaagcgctgttaacttcgattgaaaatgaaccaaaatataatcatcaataaggaagaaagacgtgcttcgagcacgtctttcttaaacgaagttattttttactccatgtatagatgacgaacaagagtgcagcataaatcaaatgcccaaatgtccagtagctaatggctgtaacgtcccataaatcaggagttggctttattgccaggtaggtgagcggaaagtatagaaacacggtgggaagtgtgagcacataggcgaaaatagcctgcgcttttttttgattagggaaatagcgagtacttccaatactgtagacaataccgataataagagagattaaaaggtgaaataggaattcgatccattcagaccaattgatatctccgataattggtataaaatcaatgtttaggagtagcgtataaacaagcttacctgttgcggcttcgattccttttaagatgaaccctagagcaattccagaaatcgtaccagcaataagtccatacttgattttaccactcatcatttgtttcatcctgatgatacagcttgaaatttcctgtatctttacgttcttttgtgcgactttcaattcgatcattgcaggtgtcacacatataagtgtggatcggtctgttgcgaagttttttagctagcggactaccgctttcaattttttcaattttatcacatagtacacattttacacgcattgttaacacctctcattccatgttgctagtatagcatgaataatcgtatcctttgcagtataatgcgttaaatcgaaggaattaactggagggaatagtatgcctaataaagtagacgttactctttcaaatgatcttttaacacttcttaaaagagagcaatatgttcttctttcgacaattgatcatgaaacagctgggccgaatgtaagtgctatttcttggctttatgcagttgatcaacaatcaattgtctttgctgttgatcaaaagtcgcgaatcgtctctaatataaaggcgaatgatcagatctcaatcacgctaattggaaacgaaagtacttatgccattaccggaagagctattttaatggaagagaggatggaaaacgttccactgaaacttacgaagtttaagctagatattaaagaagtacgtgatattatgttttatggagctaaaatgtcagtagagcctgcatatgaaaaaatttatgatccagaagctgcggctaagttagaccgctccgtgatggcacagctaaaaaaagaaacgaaccgctaagggttcgtttctttttttgaatgagtaatctaattatttgtctaaatcctgttcttcttgctgttgttttaattcattttcttttgatttaggtagctgtttatcgtttgagcgaaccggttctggttcggatttatttgatttactcggaacttcaggcattaacctaccaacaatatctgcaagttcttccataatgccacctacaggatgccctcgtttaatttcagttgccatttgttttaaccgataagttgtatctgcatctgcagtaacgacagcatttgcaccgtatggatctttttgaagtgcttctgctaccgtatatttaattgaactaactcgagaacgatcgagtttttggttcacatcaattcccactactgcatactttccagtaacaactgcggttgcgtcattcacatcaggaacttgtttggcaacagtgacgagatgttctgcaatctctgtcgctgacacatcttgattctcaggtgtgcgcaccgactgctttacgtattgtacgcgctccgtctgctcttttttttctgcaacaggttcatcatttgcctgacaggctgcaagaagaaagagagcaataatccattgcattttatacattcgattacctccgtaatgagcaatttagaaacaaatcactgcagtttattaattattttctgaataaccgtctaactttatacgctagttcatagattatagaaaacgtagatagtcccaactgtttttcgtacctgttacagcaatttaaatttggtcaggaggcgaagtgttggataaggtttacgtcctagatacgaacgtgttactccaggatccaaatgcgatttattcgtttaatacgaatgaaattgtcattccggctgttgtgttagaagaagtggattcaaagaaaaggtatatggatgaaatcggaagaaatgcaaggcaagtatcgcgcatgattgatggctttcgagaaagaggaaagctccatgagtcgattcctttagaaaatggaggaacgcttcgaatcgaactcaaccatcgatcatttcaatatttacaagataaatttgtggagaaaacaaacgataatcggattctagccgtggcgttaaatttatttctagaagaaggaaagttaaaatcgggacgtacagttattcttgtgagtaaagacgcgttagttcgtgtcaaagcagatgcaatgggaatacaggcagaggattttttaactgatagagtcgttgaatttaaccaaatttacacagggtatgaggagaagtatgtcgattcagaactgctgaatcaattttttgagaagcaatttattgaggctaagaaacttaagggaaggccgctctatcctaatcaatatgtgattttaaaagaccctgtacaggcctcttcgtcaggtatcggtaaagtcgataaaaatgggaagagaattgaaaaaacggcgatggaaacggagtatatgtgggggattggtcctcgaaacgttcagcaaagaatggcattggacctgcttgttcgaaatgacattcccctcgtcactctagtaggcaaggcaggcacaggaaaaaccttgcttgcgatggcagctggtttaatgcaaacagaagatttaaatcgatacaaaaagcttttcattgcaaggccgattgtacctgttggtaaagatattgggtttttacctggtgagaaagaagagaagctacgtccctggatgcagccgatctatgataatttggagtacttatttaatgtgaagaaaacgggtgagcttgaaaagattctttcgggaatcggttccattcaagtagaagcccttacgtatattcgaggtaggagcttacctgatcagtatatcatcatcgatgaagcgcagaatttaacgaagcacgaagtgaaaaccattttaacgagggtgggggaaggaagtaagattgtgcttctcggtgatccgcagcaaattgatcatccttatctagatgaatatacaaatgggctaacgtatgttgtagaaaaatttaaagatcagccgcttagcggacatgttaagctcgagaaaggtgaacgttctctgcttgcccgaattgcagctgatcttctttaaatgacggtaatacctaaaatattcttaaagggatctgaaccgtttgatccatctccaaaatagaagtgggtaggtccatcttccctgagcggctttccatcttttgaaaagcgaagaaagccgttcattgcttcttccattgttaaaacatgctggtttccatcactcgattcaagctgaaccctttcaccgtcttgagtgggttctgcatttgaaaggaatggttttaacggaataacaaagcttccggttaaaacacgttctttctcaaaacgcttaatgcttttgttaacgggaggtttgatccctgtgcgttctctttcccaccgctcggcttgagctcggatgtaatcgttctcattctttttaattgaatcgtcaaattccaagaaatcctctagttcaatcttgcgatcatcaaaaatccatacgcttgcatctaaggtaatggcataattgactttccccttgatgggtagaatcgtttccatctcatacaccccactatcaaaatcttttgcaaaccaagtataccggttatgcttgcatttgtcacatttggggaacagtagggtgagagtcaattttttccgagcgggaggatttaaaatgagatgtcgcacagaagaagaattagtagagctagtcagacgaagtaaaccttatacaaaggatgggaaagtagcggactatattccagctcttgcaaaagcagagcctgataaacttgccattgccatttattctaaagaagaaggttgcttatctgcaggtgatgttggggagacgtttacgttacaaagtatctctaaagttcttacgttagctcttgccatcatggatgcgggtgaagagcacgttttctcaagagtagggatggaaccgacgggagatccctttaattcaattgcgaagcttgagacaatggtgccctcaaaacctcttaatccaatgataaatgcaggagctttggttgtaacaaatatgattcatggaaactcggtggaagaaaaagttggacggattttacagctcatacacgacatgacgaataactcaagtatcggaataaatatggaagtagctgattcagaatatgagtcggccaatcttaatagagcattaagttactttatgaaacaacatggcatcattgacaatgacgtagaaatgcttcttgaagcctacactaaacagtgtgccattgaagtgaattgtaaggaccttgctaggatcgggatggttcttgcaaatgaaggtagggatcctgaaacagaacggagaattattcctagatacattgcgagaattgtaaaaacatttatggtaacgtgtggtatgtacaacgcttcaggtgaatttgccattaatgtagcgatacctgcgaagagtggcgtttcgggtggaattttaagcctggtaccaaatgaaatggggattggtgtctacagtccgccacttgatgcgaaaggaaatagtatagctggtaataagctccttgaaaatttatcttcacagtatggactaagtattttttaaagatggttgcgtttaccctgctttttcttgcaatttttttgtattccttttatgataatagaaggaatgggaaagggaacggagggatcagatttgtcaactggtatggcaacaggacatcgtgaaaaagcatacgagctgttaaaggccgatgctcataagatcctaaaacttatcgaagttcaaatggagaatttaacgatgcctcagtgtcctctgtatgaagaggttcttgatacgcaaatgtttggtttatctcgcgaaattgacttcgcggttcgtcttggattagttaatgaagatgatggcaaggaattgcttgaatcactcgagcgccagctttcagctcttcacgaagctagtatgaggaaataatgaaagctcaaactatcgtagatagtttgagctttttgtttttccgaagaggatcaagtttaaataagttcaaagtgaaattggcttgttctcattcaagcagacacattaatttccgagtatgagcagaaaatatgatagaatacgagtaggttatgaaagaattcagaagattttaggagtagatacgaatgaatgatttgctcatggtgctcctgatcattgctccaatcagtttgttatttcatgaagcaggtcatacgctggcagcaaacattttcacatcctccagtgtaaaccttcatcttgggattggaccaagagtactgacatggaagtattctagaggagaagtagccgttaacgccttctattttgcaggaggaatgaccatcagctcacaacctgaaaaagcctatggaaaagtagctatcgccatagcaggtccgctcgttaacctattgatcgctgcactaacacttctttatccgttccatccatctatcacaacctgggttttattctttaatctctggctaggcataactaacctgattcctttcaaactgctaggaaaagaatcagacggatggactatagtaaaaacccttatcaaaaaaacttaatttctataggacaggcaggtttcaaacaaaaaccatcgaaacctatacatacttcgaaaagcggagcgggcccgctaaaatccgcaggatgttggagctctttcgaatgagacgctttttgtctcaatcgaaagagcgaaacagccggaggatttggcctgcgcagctggatcttagaaaagcggagacgagcgtttagaaacggagatattggagctcttgaactagaacacgctttttgtgttctggtgaaagagcgaaatatcgtagtttctgcgagtcgcagctggatcacgaaaagcggagagcgggcccgcttaaatctgcagtgttaatcgcgctaagaacttaaacacttaaaaggtatctaaatgaaaaccaccatcgtcaaagaaaactgtgagctggtgagaacttctaaagagaaaataaacaggtaggatgacgtctatgattaaaaaattatttaagcattatgattactcgctaatcattagtgtactactattgtgcggatttggacttgtgatggtttatagtgcaagtatggtatgggctgttatgcgtcacgaaacaaatagtgcttatttctttaataggcaaatgatttggctagcggcctcccttattatgcttgtcctgacgatgatgttcccttataaagcctataagaagtttattgtgccgattcttggattatccgttatttcactattgctcgtgaaagtaatcggatcaacaacgaataatgctcaaagttggattgatatcggctcctttagctttcagccgtctgagtttgtcaaacttggattaattatttatcttgctgccatttactcaaaaaagcaggcttatatttctaattttgtaagaggcgctatgccgccacttcttgtaattggattaatttttgcattagtcgcttcacagcccgacctgggtacagctatgattatcgcaataacctctggcatagtaattttttgctctggaatgaagtggagtcatatttttggccttatcgtaattggtggcattgtgttcggcttagcttggatgtcactatcacctgaacaagcttcaaggtttacaggtgcatatgatcccttctcagatccagaagatagcggattccatctcattaattcttatattgcgatagcatcaggtggcattactggtcagggctttggacaaagtattcaaaaatatggttttctccctgaaccccatacagatttcattatggcgattatcgctgaagagttggggctgttaggggttgtatttgtaataggattgctaggttttatcgtttttaaaggatttgttatcggaatcagatgtaaagatactttcggcagtttgctagcgattgggatttctggaatgatcggtgttcaaacggcagttaacctgggggccattactggttggttacctgttacaggcgtgacgcttccattcattagttacggaggttcatcattaattctgcttatgatatcagtagggatattaataaacgtttctgcgtttgtgaatataagaaaagagcaaaaatcaggttatatcaacaaggatagtaacgttcaaatggagctttagtttaaggaggaattatcatgacagctatttcaaaaattcttgtcgccaaccgaggagaaatcgcaattcgtatttttcgtgcctgtacggagttaaatattcggacagttgcgatttattcaaaagaagacagtggttcttatcatcgatataaagcagatgaagcttatattgttggagaagataaaaagccgatcgatgcttatcttgatattgagggaattattgaagttgccaaaacaaataacatcgatgctatccatcctggttatggttttctttctgaaaaccttcagttcgcaaaacgttgtgaagaagaaggcataatatttattggtccagagcttgaacacctcagaatgtttggagataaagtggaggcgagaaagcaagcgattcttgcaggtctccccgttatccctggaacagatggcccggtggaaggacttgatgaagtaaagacttttgctgaagaaaatggctatcctctgatgataaaagctgctcttggtggcggtggaagaggaatgcggattgtgcgaagtcaggaagcgctggcggatgcatacgatcgcgcgaaatcagaagcgaaggccgcttttggtgccgatgatatttatgtggagaaatttgtcgagaatcctaaacacattgaagttcaaattcttggagataaacatggaaatacgattcacctctatgaaagagactgctctgtacagcgtcgccatcaaaaagttgttgaagtagcgccaagcgtatctcttagtgaagattctagaaaagagatatgtgaagctgcagtcaagctgatggaaaatgtgcagtacgttaacgctggtacagtagaatttttagttaatcaaaacggtgagttttattttatagaagtaaatccccgcgtgcaggttgaacatacaattacagaaatgattacaggaatcgatattgtgcaatcgcaaattatgattgcagaaggagaacatattcatggtgagcgcctcggtattccagagcaagaggagatcgactgtcacggatatgccattcaatgtcgtgttacgacggaagatccggagaacaactttatgccagacaccggaaagctgatggcttaccgatcaggtggtggctttggtgtacgtctggatgcagggaatgcttaccagggcgcagttatcacgccatattatgattcattgcttgttaagctctccacctgggcactaaactttgaccatgcttcatctaaaatggtcagaaatttaaaagaattccggattagaggaattaaaacaaatattgctttccttgaaaatgtaatgaaacatgagaacttccgatcaggcgtttatgatacgtcattcattgattcatcaccagagctgtttgtgtttccaaagcgaaaggaccgcggaacgaagatgctatcgtacattgggaatattacagttaatggatttcctggtcttgataaaaagaaaaaaccatcattttcgaaaagaagggtaccgcatttaaagtacagtgaagaaatccctcgaggtactaagcaaattcttgatgaagaaggggcagaagggctcgtacaatgggtgaaagagcagaagaagacgttgcttacagacacgacattccgagatgggcatcaatcgcttctcgccacaagaatgcgtacaacagatttacttcacattgcaggtccaactgctagaatgacaccgaatttgttttcaatggaaatgtggggcggtgcaacgtttgatgtttctcttcgctacctaaaagaagatccatgggatcgtttaataaaattgagaaagcaagtgccgaacgtcatgttccaaatgttactacgggcttcgaatgctgttggttataagaactacccagataacttaattggtgaatttgtacaaaagtctgctgatgcaggtattgacgtattccgtatatttgacagtttgaactgggtagaaggtatgacaaaggccattgaggcagttcgtgaaacagggaaagttgccgaagcatcgatttgttacaccggggatatctctgatccatctaaatcaaaatacaacttaacttattatcaggagcttgctaaagagctagaacaagcgggagctcatattctcggcataaaagacatggctggccttttgaaaccacaggcagcatacgaactcgtttcaactttaaaggaaacagtctcaatcccaatccaccttcatacgcatgatacgagcggtaacggaatctatacatacgcgaaagccattgaggcaggcgtagatattgtagatgtagcagtaagctcaatggcggggttaacttctcaaccaagtgccaactccttgtattatgcacttgatggttcagacaggcagccggacatcaatattaacgcgctagagcaattgtctcattactgggaggatactcgaaaatattatagcggttttgaaagtggcatgacagctccgcacacagaagtgtatgagcatgaaatgccaggcgggcaatatagtaatcttcaacagcaagcaaaaggtgttggtttaggagaacgatgggatgaagttaagcggatgtaccgaagagttaatgaaatgtttggtgatattgtaaaagtaacaccttcttctaaagttgtcggagatatggcgctatacatggtccaaaatagcttaaccgaggacgacgtttatgaacgtggtgaaacgcttgattttcctgattctgtagttgaactattccagggttaccttggtcagccttatcaaggcttcccaaaagaacttcagcaaattattcttaaagggagagagccaattacgacacggccgggagaactgctcgaacctgtgaattttacagatttgaaagagactctttaccacaaactaaatcgtcaagtgacaagccatgatcttatctcttacgcgctttatccaaaagtctatttagagtatgaagatgttcaagaaatgtttggtgacgtatctgttcttgatacgccaaccttcctctatggcatgcgtttaggtgaagaagtagaagtggagattgaacaaggtaagacattgattgtaaaactagtatccgttggagagccaaacatagaaggaaagcgtacgctttactttgagttgaatggtcagcctcgtgaagttgttattaaagatgaaaatattaaaacagctatagccgctaaaccaaaagtagatcgcgctaatcctaaccacattggtgcaacaatgcctggaacagttataaaggtacttgttgaaaaaggcgagagagttaataaaggcgaccatctaatgattacagaagcgatgaaaatggaaacaactgttcaagctcctcgaagtggggttgtggaacatatccatgtagcaaatggtgagggtattgaatcaggagatttattgttagaaatgaacgaataagaaaaagctgcgcattttggtcttacccctgtcaagtagacagtataaaaaaactacgctgccaacgcgtgtcgatattcaatcggcgcgcgttgctttaatttcttctggaaacgtctgtagttatagtggtagatgtaatcctcgattgcttgtctgatctcgttttctgttttacactgattgatgtacaacttctctgttttgagatgcgaaaagaaggactcaatgcaggcattatccaggcagtttcctttgcgagagtggctgcccttaacgccgtattcttctattcgtgtgttgtatgccttagacgtatactgaaagccttgatccgaatggagaacggctttcgttacgtcttttttctttgtccattgggcaactatatctagtacaagcgctaaatcgttgcgtttagaaagcttccagcttacgatctcattgttgaataaatcttgaatcacggataagtaataaaatcgtttaccatctgatacataagtaatgtccgtcaccattttctgattcgttccatttgctttaaagtttcgttttagcctatttggattgatcacagacggagtgtatccatgccttttcctctttttacgaatcaccgattgaatgcccatctcgctcatcaatcgatacacctttttgtggttgatgtggtaaccactttctttcaataaacgcgtcatagtagggtaacctgtttccggatgaagaaaatgaatccccatcatatgcatttggatgtcatgatcttgattggccctttcttcgcgctttactttactagctctccatttgtaatagcttgatggttggagggaagcaatctctaacaaccaggtaacaggagctttattccttaaatcttccacggtttcatactttattttttgcgtgattttccctccttttcgagattttgatactgcttttttaagtaatccacctgcgctttcaggtaatctctctcttcttcaattgttttaaagtttgtgcgtggcctaccatgcataggattttcctcactgcgacttcgaatatcaaacggctcaccgtttttccacttcctcacccagactttcagctgtgtactattttttattcctaattcttccgctaaagcattgtaactttgagaaccattaatgtatttcatcacggcgttctgtttaaactcgtctgtatacgtctcaaacctctgcccttttttagccatagaaaaaatcccctccaagcatcattctttcctccaccatatcatggaggtttttttgaatgtctacttaaaagggataatatcattttgcgcagctttttctattgtctgccacttcgtagagaaagcatgacaaggtagagcagaacggtgaagagtcctgatataaaaagtccatggaagagggcaagaaataaatttaaatttgaaacgacaacaagcataccacttaacgcctgtaaactaacaaacacaaatgaaacaataagacctgttcgcatcgttcctttggatttaaattctttcaacccaataattaaaatataaagcagccaaacgaaaatgaatattgctgccgttcggtgtaacatttgaattccttgcggtccagttacagcaaagagttgaccatcgctacaaaaagggacattgtcgcatgccatgctcgcccctgtatggcgtactagcgcaccggtataaactacaatatatgaataaatggtaatcgcgtataaatgaatgcgaatacgcttagggacgtgaggcgttttttgattacccgaagcttcgaatacgagaatggttaaaagaacgacacttgcaaaactagctagcgaaaaaccaaagtgcgaagcaaggataatatctgactgcccccaaacaacagcagcagcgccaagcaacccctggaagacaattaagaatacggaagcaatcgctagaaatttcgtttcgcgaagatgtcctatttttctccatgtccatatcgcaagaataataacaagaagtcctaatgctgctgaaacgattctgtgacttacttcaataatcgtttcaatttcaggtgcctcaggtagaacctttccatagcagagcggccaggagttaccacagccgtcacctgatcctgtttttgttacgacagcacccattaatagaacgagtaacatgccaaacgaggttaaaatcccgaataatttcaacaatttattcacaaataacaccttcttatctaattgagtgtaaatcatagtacaatgaatgtgtgaagaggcaataataacattgtgcgtatgaaaggatggaccattatgaaacgacgtatacaaaacaattagattcgtttataatggataaggattgcggatactgcttcctttcacaaaaccaacattatcttaccatagctgttagcaagatataatagtaagatgtgaagattgatttacattttacttaacagaatggaagaaacctggaggggtaatcgtgatagcaaataacaaacagggcttacacagtcttcttataagattgtctaacatgaatgatcgaaagactgatttacttcagtcgattgaaaaaggaggtgtgtagattgagtaaagctagaactgcatatgaagcttcgaaccgcgttatggaaccaggtcctttatcagaggcaaatccgtctggtacttggaaagatttcttaacacttacgaaattagggattgtgtttgataatttaatcaccgcatttactggactatgggttgcctcagttgctgcaggatttgatctattcgctaatccaatggtacttattcttacgatgttgggaacagcttttgttgttgctgggggaacgtcgttgaataattacattgaccgtgatattgatcaggtgatggcgagaacaaacacacgtccatctgtaaccggtaaaattccagcaaaccaggtattatttgtaggtctcgggctagccatagctggaacgatcatgttgctaatcgttgaaccgatggcggcattgttaggtctattagggctagtaatctacgttgtgctctatacaatgtggacaaaacggacaacttcattaaatacggttgtgggttcgttttctggtgcacttccgccacttattggttgggcggcaatcgacccaaacttaagcccggtagcatggggaatgttcttgattatgtttatctggcagccgcctcacttccttgcacttgcgatgaagcgggttgatgattatcgagatgctggaattccaatgttgccagttgtggcaggatttccaatgacaaagcgccaaattgtattatatacagctgcacttgtgccagtttccctattgctttacagctttgggccagtatatattaccgtggcagccattcttggtttcggctggctcgcgattggaatagcaggattttttatgaaggatgatataaaatgggcgcgaattatgtttgtatactcgctcaactatattacaatcctatttattgttatgattgctgtaaatattaatccttaagagtatgaatgaaagtatggtcagacatggtgggtagggatgcccaccttgtcttcctataactcaattttgagtaaaagctattatgaaagtgaggtttaaggtgcaaatgaaacgttggagaaatgtttggcgttttttaccactgctatcggtaattgcgttagcgcttacgggttgcgggaacgaacagctaacagctatgcttcctaagggagaaggggctgaaatgcaatttaatctcatgatgttaagcctttacatcatgatcggggttttcgttgtagtagcactcatttatacagttgtgcttgttcgtttcagacgacgtggtgaaagcgacaatgaaattccagagcaaacggaaggtaacgtagttcttgagattctatggacagtcgttccgattattcttcttttgatccttgccgtaccgacagttatgacgacgtttgcattggatgaaggaactgaaaaagtccctgaaggtgcaaccgttatcaaggtaacagcacaccaatactggtgggaatttgaatatccggatcttgaagtcaaaacgtctcaggatttacacatcccaactggggaaagagtttattttgaactcgtttccaaggatgtgatccattcattttgggtacctactctaggtgggaaaatggatacgaacacagctacaacgaacaaaatgtggctgaatgctcaggaacctggtacatattatggtaagtgtgctgagctatgtggaccatcacacgcattgatggactttaaagtaattgctcaagaaaaagaagactttgaagcctgggcagaaaaaatgaaagaagccggttcacaggcagcttctgatcaagcagctcaaggggaagaaattttcgcgaacagttgtattggatgtcacgctgtaggtagtgaaggcggtaacacgggtccgaacttaacaaactttggagatcgtgaaaaagtcgctggaattcttgatcatacagataagaacatcaaagactggatcagcaatccatcagaatacaagccgggtaataacatgcctgcgtttggcgatcagctaaatgatgaagaacttgatgctttagttgtttacttgcaaggactaaaagttgaagaatagtcatcggaaataaggaggtttcattcgtgtcagcacatgcttataaaaagaaaaatcctgtatgggattggcttactaccgttgaccataagaagatcgggattttgtatctcgcttccggtgctttcttctttctaatcggtggtttagaagctatcttactacgggtgcagttgctttatccagaatttgattttgtaggagctgaaacttttaaccagctgcttacgatgcacgggacgacaatgatcttcctggcagccatgccgctcatatttgggtttatgaatgcgatcgtgccgctccaaattggggcacgagacgttgcgtttccatttgtaaactcccttggcttctggttgttctcacttggtggcgtgctattgaaccttggttggttcatggggggcgctccggatgcaggttggaccgggtatgcaccactatcaacgacaagtcctggtaacggagttgacttttacgtacttggacttcagatttcaggtattggaacgttaatcgggggaattaactttcttgttaccattattaacatgcgagcaccaggtatgacatttatgcgtatgcctttgttcacgtggtctagttttattacttctggtcttattctttttgctttccctgcactaacaattggtcttgcactacttatgtttgatcgtttgtttggttctcagttctttgcagctgaagcaggtggaaacccgattatttatgaacatcttttctggatcttcgggcacccggaagtttacattcttgttcttccagctttcggcatgttctctgaaatcattgcaacattcgcaagaaagcgtctgtttggttattcagcaatggttttcgcaacggctcttattggtttcttaggtttcatggtatgggttcaccatatgtttacggttggacttggcccaattgcaaactctatttttgctgttgcaacaatgttaatcgctgttcctacaggtgtaaaaatctttaactggctcttcacaatgtggggaggaaaagtaagttttccaacggctaacttatttgcagtaggatttattccttcgtttgtacttggtggtatgacgggggtaatgctaagtgtgccacctgctgactatcaataccatgatagttacttcgtagttgctcacttccactacgttatcgtaggtggggtagtattcggtctctttgctggtatgtactactggtggccaaagatctttggaacagtattgaacgaattccttggaaagcttcatttctggttattctttatcggtttccatttaacgttcttcccgatgcacttccttggacttatgggaatgccgcgtcgagtttatacttatctttctggtcaaagtctcgatgaagcgaacttcgcagcaacgatgggtgctttcttaatgggacttgcaacgattattatggtttggaacattatccaaacatctgttaaaggtaaaaaagctggaaatgacccatgggatgcacgtacactcgaatgggcgattgcatcacctgctccagaatataactttgctcaaacgccacttgtacgagggctagatgcctggtggcttgaaaaacgcgcaggtaataaggaaatgattgccgcggagccgttagatgatattcatatgccggattcttctattcttccactcgttctttctcttgggttatttatcgcagctcttgcagcgatttactcaagctggataattgcgatcggtggtcttgtgatcacggcagctgcgatgattcttcgctctgtcattgattatcacggctatcatatccataaggaagatctgcctgctgaagggaggaaaggcaaatgaaatcgaacgaaacaatgactaaattgcctgccaatccagaacgggctacattagatggtaaaaacaaatttcttggtttctggttcttcctcggaggcgaaaccgtgcttttcgcctcgctttttggggtatacttaggactaaggaatgcaacaaatggtggagtatcagccaatgaactttttgagcttccactagtctttattgcaactatgcttttattaacgagtagtttaacgtctgtatttgcaacaatggctctcaagaccaatcattttaagcggatgattggatggtttgttgtaacaggacttcttggccttgctttcctaggtcttgaaatttatgagtttaatcattatgtacatgaatatggtcacaccattaaaagtagtgcatggggatctgctttctacacgcttgtaggtactcacggagctcacgtgtttgtgggaatttcctggattacgattcttattattcgtaatctaagaagagggatggacctgtatacggcgccgaaattttatctctttgctctttattggcactttattgatgttgtatggattttcatctttacagtcgtttacctaatgggaaaggtgggttaatttaatggcacatcatgaaggtcatgatacactgtcagagcacgatcaaagtcatctcgacattcatcacaagattgctcatgaaaaggaatttaagcaacagattgtttcctttgccatgatgattttcctaacgatgattgcatttgtagctgtagcaagcgatgcgatctctgatgcttttaccgttattttcatcatgattcttgcaggtattcagctggtatttcaactttatatgtttatgcatttaagtcataaaggtcatcagtatccagcatggggaatattcttcggagtatttgtagctggaacgtgtgtagttgcactaatgggcatgatctggtaaccggaatgaaagagagaagaagctgttcacgttgaacagcttcttttttatgcataataaaaagcgcagcaaagtgcgctttattattaaagtttaaaattaaatttaattagtccagcttctcttgctgaattgaatgcaattagaagaattggtccgataataaagcccataattccaagtagctgtaagccgatatacatcgaaatgagtgtagacagtggagagagtcctatatgtcgccccattactttaggttctactgttcgccgaataacaagtaaaacgacggcgaggatcgccatttgacttcccgttgcaatgtcacctgtaatcaagtaataaatggcccatggtccaagaataacaatcgaaccaataattgggatgaaatcaatcacccatataatgaaggccattaaaagcgccacttttggtgtaatcagtaaaaggccaattaaactaacgacaaatatgatgatgctgacaagaaattgcgctttaaaaaacccaaaaataacgtaagataaacgactcgtcataaattgaactttctcagccgtttggacagataaataagaatatgattttttcttaagtcttggtaagtccattaaaaataagaagagagcaattaaatagacaacaatactgactaaataattaggaatacctgtaacaatgatggtaatgatttttaagtaatcaatgctgctgattgtatccttcgtgttttcaaggaatcgatcaacttgattggtaaattcctgaacgaattcaggggggaaactttttgaaacagcttccatgtttgattccatgttatcccacaactgagtaatgttttgtatgtacagcggggaattttcgactaacgctattccttcggtaatcaccttggttataaggaagtaacctaataacgcaatgaggattacaaataaagtgaagacaataataactggaaaataccgcttcagtttcgtattcttttgaatcagtttaacagctggatcaagggcaagggcgctgagaaacgcgagaataagaggaatggagacgggtaagatccagaaagcaagcactgctaaaagcgcaatgaccaataatattagtaaaaatcgttttgtgaggaactttggcaatcttgttctcctttctaagtcaaaccatcttactctattatagtacggacttacacgctttaccagtagagagaaatgaattatttgacgaataattcattttcagccggtcatataatgataggagagaagggctagagggggggaacatcatgagaaaaccacttcaacaaggaagcctgaccatctcagaaaacgtgatcgattttattttagaagttgcgataaaagaaacagaggggatccactcgattgaagcgccagttaaaaaaacgctgatgaagatggtgggaaaaggaaaacgatcatctttccagtatgaaaacatgcacgaagatggggggttagcgttaaaggtagaagtagctattgattttggagaagttattccatacacatgcttcgttctccaggagcgaattaaaaatgatgttgaaaaaatgactgggttacaagtagatgaagtaaacgttgttgtcgcaagcttacacctacaagtcgatgatgagcaggtataaagaaacctccctccttagtaatggagggaggttcttagtatgcttattttgaaatgaacatttgcgtccaataatggccatatgaaccgccagagatgtaaccgacaccaatttcagtatacccgggattcaagatgttttttcggtgaccttcactattcatccatgcctttacaacttcttcaggagtagcttgccctgcagcgatattttcaccggcgcttcgatagctaactccgaaactttcaagcatggaaaatggagagccgtacgtcggagattgatgtgagaaataatttttgtttctcatatccgacgacttatatctcgcaactctggcaacttgccaattccaggttaacggagataggccgtttttcgcacgttcctcatttgttaagtccattacttgttgcccgacatcttttgatttttcgattgatggattagcggtcggtacgttgacttgatcaccagggtaaataaggtctggattttcaaaatgtggattggcgctaacgatttctgtaagaccgattcgataccgcttcgagattttccataacgtatctccaggtttcaccgtatatgtagtttgaccaagtgccacatctggcagagctatcatcgttacgagaagacatgccagcagcaatagctttttcatgtgatcatcccctttccatcgtagtttgaccagaagcgataattatcattctgaatgatttaatcatttatttcatttcagtttggacaggataatagtaggcgtattagaggtcattcaaccaagtaaacattgcaactacactgcttgttatactattattaaagagtgaccgtgttgtgaattacaaaggaggcaaacgaattatgaaatttgataagactggtcttgaatctacgatcgttcaattttcgattcttgatcacatcatgcatgaaaacggtttagttcttgctgggcaatgggattatgaacgcgttacatatgattataagtttgaggatatgacaaacggtgatgtctactatcttcgagtacctggcgttgcagtcgaaggtatggttgaatcctcttatgctgtcattaaattaggcaagccttatgttggaaagcattactacccacatggcgtggagtatgatgaggagttcccagaaacaattcttaacacatgctataagaaactcgaaattcttcgtgatcaattaggttcagctcttcaaagaagtatggtttcagtaggggatttagcacaatatgttactccaacaaaaccatctgatagcgttgctgaagcagctgctattatgaaaaaggaaaatgtgacgatcgtgcctgtgtgtgatggagaaaacttggtaggtattgtaacggatcgtgcaattgcggttggtggatttgccgataatcaagcgggaatgacgaaagtggaagaacttttagaaaagccatcaatgacactttctccagatatgaaacctgagcaagcagcagatttaatgaatgaatcgcgcttaacagaggttattgtcgtagacggagagcgttttgtaggaatcgtttcctatttccatttaaaagaaaaaatgaacgcataaaaaagaagagcctggtgctcttcttttttgtcattattaagagaagcgaacagttgcttttaagcatgagtgtagccaggggaagaaacagtctaatcgttgcagtttctataatggataaggcataatagatacaacgaaatggaggcgactggaatatgaaaaatgtccttcggttcgctttgctaattgttgtgatcgtcattggaatggacgtttacgacaaaatcgagtggcgtaacatcggcacagaagttgaacgaatcattaacgaagagaaattcgtgttggaaaacacgacagaaggtgtgaagcaggaagagtcaatagcgaaagatgaaccactacctgagctaacaggcgttgaaaaatgggtaggacaagaagttgatacaattaaatcgaatcttggtgaacctgaccggattgatcctagttcttacggctatgactggtggatatatgaacagtctaactcggcttatttacaaattggtgtagaagaaaatcgagttgtcacggtcttttttatgggagatgtggatgctggagagagatacccaatgggagaacaagcttcaactattttcaataatgaagcaccacaagaggaaatcccagtgaaatttgatgcttatgactatcgttttcaattaacaaaagaagaacagcagctaaaaccattagtggcgattcacggagaattatttgcccaatattattttgataaatttaatgggagcttgcgggcggttagaatagcagagcctggtgtactcgttgaacaaagaccatatgccatttcttatcgcggtgaattgctcgagcccgaagagttatcagaagaagaatggcagggcgtccaggcggcaatggaaaagcaaatttttgctatgacaaatgttcttcgtaacctttcagaaaagcaaccactaggttataacgatgaagttgccaatgtggcgtttggccacagtaaagatatggaagagaataattatttttcacatacttctccatctgaaggagagctttccgatcgtttaaaggaaggagacgttctttatagttatgcaggagaaaacatcgcagccagatatcctgatgcaggagctgcgatgattggttggttaaacagtaaaggacatcgtgaagcgcttctgaatgaagaatttactgaaattggggttggggttttccgcgactattatactcagaattttattaaacctttctaggaataaccataaaattaccggtggcagtggcaacgatcgtgtcatcatcgcgatagacgtttgcttttacgacccatctcgtatggcttttaaaaacgatgtgtgagcggcatcttaattcattgccgtcgcctttagataggaagtggatgttcatctcagatgtcactgctgcctgatcagaaggaagtgattggtgaacaagagagcccatcgcaatatcaattaaggatgccgtgatgcctccatgaaccatttgcagaggattatgcacaaggtctcgaacgggtatgatgctttcgtatgtattatcatcgagaagcttgctcttaattcccataaacccagctaaatacgtcttatactcatttctttgtttctttagcacgccttctaataatgaatagagagagcttttttcactttcatctgcttcagctaggatttctgaaaaaaattgaagtagttgctgctcttccatataagtaccattccttttgacaagttattgtttctactagtttatcaataatggtcgtattcaccaataaataggcgcacaattgttaaaagtctaattatgatgtagtaagaccatttaggtttcatggaagtggaggtggcgaatttgcctgaagcaaaagaaaagggaagtcaaaaagttcaggaatttaaaacgttcgtcaaagctcatcctcatgtactaaaaaaagtgaagcagaaggaaaaaacgcttcaggagttgtttgaggagtggatgctttttggtgaagaggatccaagctggtatgaagaaaatcaagaagaagatcgagaagcaactaatgaaaaagggataggtagcatgctcggcgcgattaaacaaatgaattttgaagaggttcaaaaagggattgagcaattcagcggtgccgtatattcaattcaagaggttttgtcccaatttcgctctaaaccaaagtcacagcctccttactctcaatcccattctccttttccgtttcgacatgactaggaggagatacaatgcgtgaggaagtacaggagtttttagccaatcgtcaggatcttgttttttttctaaggaatcagccagtttggtatcgccgattaagtagagaaccatatgcgttgaaagagtttgaagaagcatcaaaaacgttctacggtcagacgtttccgcaaaaagttgaccgtttccagaaccaattaaacatggtgaatatgatgcttgctttaatgacccaattaaaaaattagggtctttttttattattcttttcactcgtgggcacacttaggaaagaaggggtgtggatgcacatggttgttaagcgtttaggaaggcatctgatggtcattgctttaatgattagctgttgtgtaccagttgttgggttcagtcaagcactgcaagaaaatgtctcagctaaagagaacacagagccagttatattaaatcatcgggtgaaaggctctgacgtttttattgagtgtttgattccaaatttttcatttgacgatggaaatacgacaaaagagtatcatggatacttagatgtctatctcgatggtgaaaagtatcaaacggttgaccgagctgcgtttgtcgtacgtaacttacctgaaggaaagcactcgattcgtcttgatattatgcgtgaagacggtgggcggtatttatcgttaaaagaaatgaaagtggaaataaaataagcctctaataggaggcttacggttaagatatttgcttaaatggtgttgttggcgggacgataggtggaaactgctcttgtaaatagttgaaaatcaatttctcaacttcaattccctggtggacaagtgcttgattaccaaataaacagttgaattccaaaaagtaatactttccattagaacaaacaacatcaaaaccggcatgattaatcccaagcgcttttgcggtcttatcaactaaatcgagcgcttcttcaggaatatcatggaaagaaagtttgccgccttttgcgacgttatttagaaatgattcgcctccaacacgccaataggctgatacaacagaattcccaacataaaccacgcgaagatctttttcaattggcaaatattcttgcacatagagaacctcattgcgttctgcatacgcgcggaattcttcctctgtccgaatcaaaaagacaccatttcccattgagcttctaacttcttttgctacaaatgggaaagagaacgtatttagaatgcgttcaattgactcgttagaacgtcctgcaatttctgtataaggcataagatctggcgaaagggaccaaaaagctctcgtcatttcgactttatcgaagccaagttgaatcgattggatcgaagggaaaatctttttatttaatccataaacaagagaattcacttgccacttttctggaaatagcagcacatctgcttctctaattgcatgaatatctttaaacatatgatcgggtttaagataagatacgcctgacataccaagagttcgaaacggattgaacgtaataagtttcacagttttctttgtcttcctttcttagatgaaaacacataaatctagaaaattatagatccaattacataaaaagtcaataaccaaatcgtggatattcactttactactatagtagaggactggtcagggggttcctaaaagtggtaagataaaggtggaggtgtaggtatgattgctactctagatagtgttatgattttagatcaggctgaagagcttggatttttgataaaagattcagaagtagctcatgaatatcatgaggctaggaagcagttatcaaaagatcgggaggcgcagcgtttaattaaacgcttcacggaaatgaaagaactttatgatgaggttcaacgtttcgggcgttatcatcccgactttatgacgattactgtaaaagtacgtgaagcgaagcgagatatggaccttcacgaagcggtagcggcatttaagaaagcggagacagagcttgaaggccttcttgtagaggtttgttctctattagctggtgaagtttctccttctattaaagttccttccggaaatcctttctttgataaccaatcgtgtggtggcggctgcggctcaggcggcagctgcggttgtggataaccagagcatttgctctggtttttcaatttcgaaaccgaatgcagtcaggacagaggttcccgcaacaaaacattttttcttggggtactaaaaatcgtacgcgataaacaagcagctgctcttcttcacgaacgaaggaatattccatccttaattgctttcctcgcatgcttttagcagcttccaatttaattaacatctcaatctcagcttttcgaatattcgaatttactgtaagatagagaaagggaataccagttattgtttgttttgaaacggtgttcacataagttgattcggccagtcgatttagaaatggattccatatctcattaagattcattttagagcatcctttcttaaagacggtctcctaatatcgtaactgaatcatcatcaaatgaccactccgtttaagaggggagtggagttcataagtaaaggggaaacgcgtcatgtttgtagaacgggttggcctagcagtctatattcagtcactaaagcatgccaaacagctaagaaggtttggaaatgttcactacgtttcctcaaaacaaaaatatgtcgtgatttatattaatctcgatcaattggaaacaacgaaagagcgcttgaactctcttcactttgtcaagcgagtggagccttcaaagcgtccagaagtgcaaactgaatatcaaaacgctaagcctgataaagcaaaacaatatgattacaaaatgggtctctaaaaagctaatccttttaggaggctttttttatgttcatttttaataaaccaatccgaaatggttgattatttcggctaccgaagtatataatggtcgaattaaaggaagtgacatagtggagaattggaaacgaaatgtgtggattttgtttggtagtcaatttctagtcctaggtgccatgacgatgatcatgccatttctccctttatacgtgcaagaactcggtgtagaaggagaaagtcaaattagcctctggtcaggcgtcattttcggagcgaattttttaacagcatttttattttcaccattctggggacgtatggcagatcgacatggacgaaagctgatgcttcttcgttctggcttcggtatggcaatcgtaattattttaaccggatttgccacaggtccctggtctttacttggtttacgtttacttaatggagttgtttcagggtttatccctgctgcaattgcacttgttgcaacgaatacaccaaaagagcacgttggttatgctctcggtacgctaaattcaggtgcggtcgcaggtgccatttgtggtcctttatttgggggattaatggcagaaacgtttggttttcgaatgatctttaatattacgggtattgttattttacttgcagcatttgttgtcctatttctagtgaaagaagagaaaaaaccagagccctcagccaaaaatgagaaaagcaacgcgataaaagattttaaaaaagtaacggtgaattctccgatgctatctttaatgcttgtaggttttcttgtacagtttgcgcttcttggtatgaatccactcatacctctttttgtccagcagcttacaacaggctcgaatgtggctttatttgcaggtattgcggcttctgtcatgggagtagccaatatgctagcttcaccgaaacttggaaaagttggagatcgtaaaggctctcatcacgttctctattactcgttaataggggcagcgatcttttctattccacaggcatttgttcaagaactttggcaattaattactctccgttttttattagggttatgtattgggggattgcttccttcagtcaattccttagttaaaacgttatcgcctgctggcatggaaagtagaacgtatagtttctccaatagcgcggtatatttaggaaacttacttggacctgtaacggggggagccattgtagcgttggttgggacaagaggtctctttttatttgctggtatcatattgctgattagcgtagcgtatgtaaaaagaaaagttctcccaatccttgatcgcaaacgcgcagtttatgaagcgaaagaaattccatcataaaaagcaggagccattggctcctgcttttgttcattctatgaacttactgaagcggaggaatcaagttatttaagcgaagaatcccaataatatagttgaaataaagatctacttcgttaaattcacttgaaggctttacttcaatagggatgattggcgtttcgagctctttgcttaatgcttcaaatagttcctggcgctgtacagaaggctcttttgcaggaataccttctctagatatgtaaagaggctgtaggtttccttcgccagcgggttttaagacgactactggtgataaaacttccctgttattcttaatggttttaagtacgagtaaacggtgaacgcgatgggaattcgttcttgccagttcaactaattcatatatatcagaatagccttcaccaagttcgataaagcgttgaatcatgttgtcactctcctttcctttaaatcagaaatccaatcataatgtagcatgaattctttatgatggaaaggatgaagcgtttgcattagaatgaaagaaaggaggttcttctatgggctcgattctgcttctggttggtttagtaggtgggttgctttatctatactggaaaggaagacatgctaaagaggaaaccatcgataaaaagttgatacagggattgattatcgcagacattcttgctgcacttgtgttgcacggggtcataacagcagcagaagctgaaatgctttcagagcaatctctttcagaggtagaagattatttgtttaatcatacgagtattacagaagggtcatttagcgactgggttcatcacgattgggatggtgtacagattgttgatgcactcgacattgatcctggctaaattaagaaacctcttattgtttgataacgataaaaaaacccgcaggatttcctgcgggtgcctttagctatgaagctaaggcaaatgggagaggagaaaccggaggaagaacttatggggaaacgtaagtcttcttccgcggttggcaacatcgttatgaacgatgctactacgtttagtatcgccatcccaaaaacgtttatacatggattttagctttccctttttttgtggtaggataagtaggaatatggaaacgataaggttgtgagagagatgcgtattattgcaggagaatgtaaaggaaggcaaatcaagcctgttcctggaacttctacaagaccaacaacagataaagtaagagaatcgatttataatatcatcggcccattttttgaagggggtctcgctcttgatttgtatggaggtagtggagcactaggcattgaagctttaagccgtggtattgaaaaatgtgtgtttgtggatcgagaaagtaaggcgattgaaacaatcaaatggaatttggagcaaacaaaatttacaaaatccgctgaagtttttcggaatgattcaaagcgtgcgctaaaagctcttcaaaaacgagaggttaaattttcacttgttttattagaccctccttaccataaagagcaaatcttgcacgatcttgaaaagcttacggcttatcatttgttagacgatcaagcaacgattgtcgttgagcacaaaaaagaagtgacgcttccagaatcctatgcaggattgcgaatgattcgtgaagaaacttatagcgggaaaacaacgatatccatttatacatatgaacagttgcgtgttgaggaggagaattagtcatggcaaaaattgcagtatgcccgggtagttttgatccagtgacttttggtcacctagatattattaaacgaggtgcaagagtgttcgatgatattaaagttgtcgtgcttaataatcagagtaaatccacattattctcagtagaagagcgtgtcgctctgttaaaagaagcaacgaaagacattccgaacgttaccgttgattctcatcacggtcttttaattgagtatgctaaaaaagtagaggcgtcaacgatcttacgcggattgcgtgcggtatctgattttgaatatgagatgaaaattgcttcaattaaccgaaaactagaagatgaaattgaaactttctttatgatgaccaacaatcaatactcctttttaagctcaagtattgtaaaagaaattgcgaaataccatgcacctgtctcagatctagtacctgagatcgttgaaagtgctctcagacaaaagtatgcagaatccccgttaagttaacgggggtcttttttctacttaaatatccgttgattcccagcacggtaagtaacaaggatgataaatataagtaatgaaaaaagggtgatccagggtcctgtttgcgtaagaaaagaatagacgctttcaataaaagatggggcatcttctcgatttaaaacaggaagagagccattacctgaagataggtaatccaaataaataggtttccaaatgataagtgtaagaaaagatgcgaaaaagccatgaagcaatctcgcgaaaaaaaatggcttgaaccgaatgtcggtatctgccaaaatacttgccacctgtgcctgaacggagaatccattaaaagccagaatgaagcttgtcacgatcgcttgagcaagaagtgttgtagagctttcacttgctaatctgcttcctaacgtaatttcaaacattccagaaagtaatgggatatctagctcaggggatagctgtaacagtaacaggatggaccgaattactcctgcaagaatagcagcgattccaatcacaccgagtagctcatttaaaacagaaaacagaataatgaagccaccaaccattaatagtgttttaattgaagaatgaacagcatctcccatcatttttccgaatggacgtggatctgtaagtcgtgtttcatggagagctgaaaaagcaagtccgagtcttgactcagaagatcggatcatttcagtaggatggcggtcctcaggatgatgaaaacgcatcacgaacccaaccaaaatattacctgcgtagtgggcgatcgctaaaataacgccaagtgcgggattatggaaaaaaccaactgcaacagcggcgaaaataaaaagcggatttgagcagtttgtaaacgaaacaagacgttctccttcaattgcagtgatgtcattattttgacgaagatgagcggtatacttcgctcctgcagggaagcctgacgcaatgcccattgcaaatacaaaagcgcctgaacctggaacacgaaaaaggggtctcatcaaaggttctagtaaaatgccaataaatcgaacaactccaatgccaattaggatttcagagataataaaaaagggtaataaagaggggaatacaatattccaccacatggataaaccgcttttggatgcctctagtgtatgatcaggaaataaaattacggcgagagcaacgaacgtcacggacgttgcaagcattatggttttcattacttgaacgttcacagttgcattcctcccacttcatgagcagtaaacgaaaaaagtttctctaacctgtccgattattaaaatatacgtatgtgaggcacaattagaccatatgattaagcaggtatagacagggaggcgttctcaatgaaccgtccaaagatcggattagctctcggttctggaggagcaagaggattcgctcatttaggcgtgcttaaagtactgcttcaagaaaaaatcccgattgattgcattgctggaagtagcatgggatcactcgtcggtgccatttatggatcgggacatgatatcgaaacgatggagaaaatggcatcgctttttcgtagaaagtattatttagactttaccgttcctaagatgggttttattgcggggaataaagtgagaagtttaattgaaacgttgactcatggaaaacagatagaagacatggaccctccgcttgcgattgttgcaacagacattattaaaggagaaaaggttgtttttcgaaccgggtctgttgcacaagcggtaagagcaagtattgcgatacctggaatattagttccagaaaagattggggaacgccttttagtagatggaggtgtaattgatcgcgtcccagtttctgttgcaagagaaatgggcgccgatcttgtcattgccgtggacgtatccaacgtaaagaaagaacctgatgtaacatccattatagacgtcattatgcaaagtatcgatattatgcaaaatgaaatggtgcggctgcatgaaattaatgcagatgtcatgataaaaccaggtttggaatcctttcaatcaagagcttttacaaacgtattggatatcattaaaatcggagaggaagaagcctatcgccaccttgaacaaattcatcaggcggtgaaggtgtggaaggagaaaaataaatgaatcgaagcaccaagaaattcacctatgtttgggcaattattattgtattggtggcggcctttacttttattgacctcccctattatgtgacaacaccgggagaagcgagagtattagatgaagtgatcaacgttgatggtggttcacaagatggtggagaatttatgctgacaactgttcgagtgggagaagcaaacgttattcagtacatctgggcccaatttaacgaatatcatgagttaattgaagaagatttgattaaacgtgaaggcgagtcagatgaagagtaccatcaaagacagctagacgtcatggcaaactcacaaacgagtgcgacaattgtagcataccaggcagcgaataaggacattaccattacaaaaaatggtgttctcgtaactggaatcattgaaggaatgccggcagatgggaagttagaactcggcgacttaattgtcgaggttgacggagagaaagtggaagaaaccgaacagcttcttgagcaacttggctcttatgaaaagtcagacacggttaacttaaccattaaaagagaagataaggaaatgaaggtggagcttggttttgcagagttcccagaagcttataatgccgaagacggtaaagtaggcgttgggatcacaggtcctgtcacagcaacgacgatcgaaacagatccttccattaaaatcaatacggacgaaattggtggaccatcagcggggttaatgttttcacttgaaatttataaccaattaacagaagaggattggacaaaagggtatgagattgctggaacgggtacaatcaatgacgaaggtgaagttggaccgatcggcggaataaaacagaagatcgtggctgctgatggatcaggggcagaaattttctttgcaccggttgctcattccaattatgatgatgcattagaagcaggaaaagatattgataccgaaatgaagattgttcctgtggaaacatttgaagatgctcgtgagtacttaaaacaattgaaagaaaagtaaaagcattcctaatgcaaaagggcctggcgattactgccaggctttttttagatcattaaaggtacagatttatattcttttttaagaaagttttcttgatgctgaccatcgtatccgagtgcataaacaaggcttgctcgtctttcaatcgtcagaaatgggtggtccgattgattgatattggaaacgaggggaatagaaagcgccccttttttctgactaagaaacgttcgccctgattttgtcatgccaagaatacgaatatatggtgctttcccatctagtgctggcttcatgtcctccttagtcgtttgagtgaggacgtgaagagcgaaccgttgaattcttgtccacgtgtatcgtttggttttgacaaactccataaaagattgaaaatttggggctttcttagccatcgaaataaggcgattctcaagcccttcctccgcttcatagatgaaagaaaggtccttattgttcgtcgtaagtagtttataacgcagcaggtgataaagcttgtgccacccgtggaagtcgctatatgtatgctgatagtcgaggagcttttggtaagttggatgtggcacataattgatgatgtgatcaagagtgctaccttttaatagctcacttcggatacttgttgcgcttgcaatttttacatcgacaaattcttgatcatgataacctgcttttgttcgtaaaattgtaaagggctgtagatgagaattaagatcttgaatcgctttaacatagtggtaacctagtatgttatttggttgagagagatcaagcacgtttgcgtgtccgtcaagactctcaaaggcaagcgatgacgcttttggatagctatttccctggcccatgtaatatttaattcgttcgttatattctggttcattgttatgaataaatgttgttgtcttttggaactcttctattgcacccgattcacttccaaaacagagggtatccactccgagggaagttaggagagatattgctccttttgcaaagatttccgctttttgggtagcataaacgtagggtagctcaatcacaagatcaacaccgtttcttagagccatctccgttcttgtccatttatcaacgagggctggttctccccgttgaagaaacgaaccgctcataacggcaaccaccacttcagcattagtcgtttttttcgtttcttctagatgataaagatgcccattgtgaaaagggttgtactctacaacaactccagcagccttcatacagtcgctcctctcgatccaaatctaattggacgtccatttttattagttgaattcaaggttttttctctggtatgataaacattataccaagattaccaatgaaacaactggtgtaaagaaaaaatattgacatttgcttaatttgtagctataatacttttgttgccttgaggtgatacacagatgaaatggtcaattgaacaattgaagtcctataaattaaaaggccttacaattgacgaagaagtgaatgtagaggaactgaaggaacgtaatccagatatacgtgagattacgccagttcatgttaccggtgaaacatcgtttcatggtaataaggttacctttcatcttacagtgaaaggcaaaatggttctaccatgtgccaatacacttgaagatgttgattttccgttcgtacttcgcccaatggagacatttgtgcttgaagcaaacacaaatggcgttgattttgaggtggaagatgaagaaattcatcaagtttcgggaaatacggttgacttagttccgtatattaaggaaaatatacttttggagattccgattcgcgttgtgaaatacagctctgaatctgaagaaatgccaaaaaaatccggaaatggttgggaagttattacgaaggaacaaccgaaagaaaaggttgatccacgtatggccggcttagctgattttttcaataaggaaaatgaggatagctaattcaaaaatttccgtaagacagttaactttttaaggaggtggaaacaatggcagtaccagctagaagaacttctaaaacgcgtaaaaacaagcgtcgtactcattataaattagaagtaccaggaatggtaaagtgccctaattgcggcgaatacaaactttctcaccgtgtttgtaaagagtgtggaaattacaaaggtgaaaacgtagtaagcaagtaatcttgtgaaacagagagagaaatctctctgtttttttacgtgttaaattatttgatttttctaaaaaagggagagggcgagatgaaaagtgtgatcgttgaacatcgtaatcgagcagcaatcttaaccattcatcgacctgagcaaagaaatgcgattaatggcgtggtaatggatcaattaatggacgcgattgaaaaagctgaagcaaacgaaagcgtaagttatattgtgctcacaggtagcggagagaaagttttttgtagcggcggggatttgaaggcatttcaagggcttaagacagctgaacaggcttatcccatgcttcgcaaaatgggtgatgttcttgatcgcttgtttttctgtaagaaaccgaccgttgcgcttttgaatggtcatgcagttggaggcgggttggaacttgcaatggcatgcgattatcgggttgctaaaaagaacacgcaggtaggatttatacagggatcgatcgggttaacgactggctggggcggatctacttatgccttaacgagaatgaattctactgaagctttaaagatgcttatgagcgctgatcgctattcgagtgaagaagctcttttaagcggttgtcttacatatattgcgaatgatcatccatgggaagaggatgcttatcgctacatagaaaaccttttaaaacggtctccactaattctttctacttataaaacctactggctcaatagccttgatccacatttcatccgtcatcgagttgaagaagaaattagaagctgtgcacgcttatgggatacagatgagcatcatcaagccgtaaaggcatttttagacaagaattagtaaatttgtatagtataaagtaggtttgattccaacattttttaggttgttttgtaataagaaaaggtctatccttctctcgctaggattaaaaaaatagattcttcataaatagaagagtctactatatctagtaaacgcatatgatgactgtaaaacagttattggggggattgcgattggtaccgattcgccaggatgcttggtcgaaagatgaagatgtattattagctgaggttgtgctacgtcacattagagaatcaagtacacaactcgcggcatttgaagaagtaggtaagtcattgtctagaactccagccgcctgtgggtttcgatggaattcgcttattcgtaaacagtatgaggcggcgatcacgttagctaagaagcagcgcaaggaacagaagaaaaatcaagtggaagtgaaagtagactccgcacaagaagatcgaagcatagatttaatcgatgaagccattagcctattgataacatcgaaaacttatctctctgaaacaagtaaaagtgaagcatcactacaggaggcgctggctgaaaaccttcagcttaagcaaaatcttcatcaattagaaaaagagtacctgacagttcaggaagattatcaatcgttactagaaattatggaaaaagcaaggaaaatggtgatctttcaagaagacgattcaggaagtttacgttttcaaatggatgcgaacggtaatttagaaaaaataaagaaataggagcgtgtcagctcctatttcttcgttactcctgttcggttacaccttcaggataccatacatagggattttctccacgatcgcgttcgggctgataagtgactgcttcaaaacccatcttctcccaaaattcacctgaaccttgcctagcgttcgtttttaccggcaaattaaaggtttttgcgaaattcacaagcgtggaaccataatcacgattatgatattgcggaagtacttcaagtttccagagctcaaggtaatcctgcggtggatcaaaatagcgatcgtatttgccatcgatgcgatacaagctcattctagcaacaagcttatctccatagtaaataccatagaatggagattcgctatcattctcaatgatgttatcttgcaggtcctccatcattgaaagttcttgaataccaaattctttaaacttcttaaactcctcgagagttttgtaattgattacaagtggacgaactgttagatctaccatagtggccccctccaagcatgcttcttattctctaagatgattagaagtaaaacttctacctttctattataaccgaaaacacaaaacttttcctcatttcaaaaaacaaagtataagaagaataatttgaatatttattgaaacgcgaaggtcatttaatgatatgataaatgtaagggttttcatacctgttaattcattattgtgatgagaggggcgatactttgaaaaaaatcctaattgcaaatcgtggcgaaattgcggaacgaattataaggacatgcagcaaactaggtcttgagacggttgctgtttattcgagtgcagataaggatcttccatatgttaagcaagcaacagtcgcatatgagattggagacccacctgcagcaaaatcttacttgaatcaggagcaaattctgagggtagcaagtgaagaaaacgtggacgcgatccatcctggctatggatttttatctgaaaatgctgcatttgtaaggaaaatcaatgaacatggaatcacgtttattggacctacagcagatgttgtggaagcgatgggcgataagattacagcgagaaagacgatgcaggaagctggtgtaccggtcgtaccaggcagcggtgaaattgtggatgtagcggaggccattgcatttgcgaatgaaatcaactaccccattatgttaaaagcagctgccggtggtggtggcattggtatgcagcgttgtgaaaatgatcaagagctagagaaagcattcgtatcgagtcaaaaccgtgcaaaggcttattttggtaacggagcgatgtttgtagagaaattcattgacgatgcgcgacacattgaagtgcaaattgtaggagacaatcatggaaacattgttcacctgtatgagcgagattgctcgattcaaagacgaaatcagaaggtgctagaagaagcgccatcaccatttttgtctaaaaggacccgcatacaaataggagaagctgctctactagctgctaagcacgtccaatatacgaatgctggaacagttgaatttgtcatggaccaggatgagaatttttattttctagagatgaacacaagattgcaagtggagcaccccattacagaagaaacgattggcgtcgatttagttgagtggcaaatcaacgttgcagaagggaaagtactccctctcaaacaggaaaacattcaacctacaggtcacagtattgagcttagactatatgcagaagacccaacatcctttatgccttcacctggaaagattgaaacgctccatttccctaaaatggaaggggtccgcattgattcaggttatgcaagcggctcaaccgtgtccccattctatgatccaatgattgcaaaaatcattgtatcaggctccagtcgcgaagaagcgattaaacgatgtgaagatttctttacttcattttcgctaacggggatcaagcataatggaccgctttttgcccaattacttaaagaagagaattttcaacaggggaaatattcaacgtcttatctagcaaaaattcttgtaaaaaaataatactactgaaaaggaatgatgaacatgcaagaaattaaagcatcgatggcgggaacagttttaaatgtaatggtcggagaaggtgatgcgattacagcagggcaagagctcgttatgcttgaatcgatgaaaatggagattccgattgaaggtgtggaagaaggaacggttgcagaggttaaagtgaatgttggcgattttgtaaacgaaggcgatgtactcgttacggtaaagtaagcttgtgttctgaacgagcgctcgatctaaccctaaatgaaggaggatttttcaatgaatcatctagaagagcttttatcgtctagagcatcagaggttgagtctgggggtgctgagaaatatcatcagaagttaaaggaatcaaacaaactttttgtacgtgatcgtctgaagcttctgtttgataatggcgactatatggaagacggaaaatttgcaaaccaccttgcaaaagatctaccagcagacggtgtcgtaacagcgatcggtagtgtgaacggggaaaaggtatgcgtgatggcgaacgattccactgttaaagctggctcatggggagcgcgtacagtcgaaaagattattcgcattcaagagacagcgatgaaccttaaagtgcctcttttgtatctagtggattcagctggtgcgcgcattacggatcagttagaaatgtttccgaatcgtcgcggagccggaaggatttttcataatcaagtaaaaatgtctgggatggtgccccaagtttgcttgttatttggtccatcagcggcaggtggcgcttacataccggcattctgtgacatcgtaatcatggtggataaaaatgcttcaatgtatctcggctctccaagaatggctgaaaaagtgatcggtgaaaaagtgacgttagaacaaatgggtggtgcacgtatgcactgcagtacaagtgggtgcggcgatgttcttgctgaaaatgaagagcatgcaattgaacttggaaggggctatctaagttattttccggggaatttccataagcagccgcctcatctagaagggaatcttccttcggttgagaaatcaatcagcgagattgttcctgaaaatcaaaatgcaccattcaacatgtatgatttaatcgatgcactcgttgataaggaaagtttttttgaaatgaaaaagctctttgcgccggaattgattacaggctttgcgcgaattgacggacgagttgttgggttggttgcaaaccagcctaaagtaaagggtggcgtgctttttgttgattcagccgataaaggagctaaatttattcagctctgcgatgcgtatcatatcccacttatttttctcgcggatgtcccaggttttatgattggaacgaaagtagaaagtgctggtatcattagacatggggcgaaactaattgcggcaatgagttcggcgaccgttccaaagatttcagttgttgttagaaaggcttatggggcaggtttgtatgccatggctggccctgcatttgagccggattgttgcatcgctcttccaactgcccaaattgctgtaatgggtcctgaggcggctgtgaacgctgtatatgcgaataagatcaatgcgattgaagatccaaaggaacgaattgaatatgtaaaagaaaaacatcaggagtacaaagagcacattgacatttataaactagcttcagagttaattgttgatgatattgtacctggaagtgaactacgtaatgtgttagtagagcggttaagctactatgaatctaaagaagtggaagcaccatctaaaaaacatccggtctatccggtataaaatgctgaaaatcccttaacttaactgttgagggatttttttctcatcaacatgataaacctgtgctaaactttaaaataaagactcacgataggtggggaatatgttgaacgtaacgataattggagccgggtcaattggattactagtggctgcgaagcttgcaatgaatggacaagtagtgacagttgtgtgccgtcgcaaaaatcaggctgatcagctccgtaaaggtattaactacataaatcgtgataagactcagttcgtcagtgtacaggcaacgcatcgtctgtcgccaaaaataacggatttactcattgtggcggtcaagtcaaatcaagttccgtcagtgctgtcgttgattcaagaagtgtatcaagattcgaatttgccggatatcctttttattcaaaatgggatggggcatctttcctatatcgatttgttgcaccataatgttcttgttggggtagttgaacatggtgccctgaagatagatgaaagaacagttgaacatactggtgatggaatcattagaatgagcgcttactcgggtgttccaaattcaataacggcgctttctagcgaagattttccggtttgttacgaacatgactggtacgagatgcttgcgaaaaaattagtcgtaaattgtgcgattaatccacttagtagtatatttggtgttttgaatggagagcttttgcaaaatgcaaggttttatagtttgatgagagaattagtaaaagaagcttgcgaggttctcgagttggaatttgaacggtcatggaatgatgtgcagctcgtatgcaaaaagacgagctcgaatacgtcttcgatgctcgcggatttaaaagctggaagattaactgaaatcgatgcaatcactggattcgtactaaaagaaggagaagcacgcgggaaacatgttcctttttcaaggtttgtctttgatagcgtgaagggtcttgagatggtaacgagatagagaagggagtctcatgaaatggaaaacctcttatcatggattgtagcaacggctgtgacagccccactgctcgcatggtacctggtctatattattacggtgaaaatgacacgaaagaaaaaattctcttttcgtcttgcagtagatctttctacaatcttttttattttaagcgtgcattttattctaattgaattagttggaaagtcttttctatgggttattttattaatgattattggagccgccggagcctttacgattctgcactggaaaacgaaagaagacattcacattcataaagtgataaaaggcgcgtggcgatttaattttctattgttctcgacagggtatgtagttcttttgcttattgggttagttcaccgaattatttcggtctaactcataagctttttttttggtagcgatgaggaagtttgatatactaacaaaggattaaataggcggatttcagtaacggtgtcaagaaaggaagaaatattaatgagactcaaagaaacattccttccaggatcaaatgtcattgcggcagactacatcgctgagaaaacaacgctctcagctttttttgactatacatatcatcatgattcctcgtatgaagagcgatacaaagagttaatggaacgtcatcaagatcgtgcgaatttaactgaacacttgatgacgtttaatgagaaatttgaagcagaaggaccggcgcttacaaatatcgagcgtttacaacaagcagaagcggtcacagttgttgccggacaacaggctggcgtgttaactggtcctctttatacgatcaataaagcgatatcggtcattaaattagcagaagagaaagaacgaaagcttggggtgcctgttatacctgttttttgggtagcgggtgaagatcatgattatcatgaagtaaatcatatttattcgtatgatgaagggcgcgagcgtaaagaggcagtgcctcaaaaacaaatgacaaaacaggcattatccgatatatcgcttgatcatgacgcgatgaacacttggacgcgtgacatgctcaaacgatttggggaaacctcttatacgaaagagattcaagggtttcttgaaggtgtaaccgagaagtcaaatacttacgtggatcatttttgttacatcatgacaaagcttttttcaaagcatggacttgtgctcgtagattcaggtaaccgagattttcgccgtcttcagacggacgcgtttaaacaaatgattcatcaaaacgaaacaatcaatgaaggggttttaacccaggcggctcatcttagtgaagagaattatccaattggtgttgacgttgatgatcaacaagcaaatttattcgtaaaggtaaatggcgagcgaattttactagaacgactaaacggaagatttgagggaaaaacggcttccgtttcatactcaaaagaagaactgcttgaattagcggaacgtcaaccggaagatttaagtaacaatgttgtcacacgaccgatcatgcaggatttaatgtttcctgtgctaggatttgtggctggaccgggtgaattagcctactgggctttacttaagcctgcttttcatacttttggaataaaaatgcctgtcatcgtgccacgacttacatttacgtttgttgagcgacatattcaaaagtatgtcgatgatctctctttatcagaggataaaatactaaagtcagggattgatcactcaaaagaaacttatatgcgccagttagatgatgtagggattgggaccacatttaacgatgctaagttgaaagtggaggaaattcatcaaaaccttcgcgatttaacagaatccgttgatcctggacttgagcgctttgcggaaaagaatggccggtttcttcaaaggcagcttgaccttcttcaacaaaaactctatcaatcactcgagtttcagcatgaaaatacgctggctaaattcgatgaggtgggatttgcattaaagcctaacggcgcgccgcaagagcgaaagtggaatgctgtctattatttaaattggcatggtttggattttgtggatcaaatgatggaactggagcttccctttaatgataaacataaggtgatttatctttagaggatagaaggggcaggagctgttatttcgattcctaactatatagtagaaaagctgccggagaattctggcagcttttcttagtttggccaatatatttgagatttggccaataaaaatgagctttagctaatataattcgaatttggccaatatcctcagaattcggccaatataatgctataagacattgtttcattcgacaaatagcggggggtgacaggcacccgcggaagggcaagtagtccatttgttagaaaaccaaatatttttaaagaaaaatcctgctgaacagcaggatttttgtgttgtggtacgaattaattttttagtggtgaaaagtggggagttgtggtaacttagaggtagaaagtgggagaggtggatgaagccatgtttatgggggaatatcaacatactgttgatgaaaaaggcagaatgattattcccgctaagttccgtgaagaacttggagacagcttcgtcctcacccgcgggttagataaatgtatcttcggctacccaatgaccgaatgggaagtacttgaagagaaaatgaaatcactcccttttacaaagaaagatgctcgtgcttttacccgattctttttctcaggtgcaactgaatgccaactggataaacagggcagggtaaatattgccggaacattacgccagtatgcagggcttgagaaagaatgcgttgtaattggtgtttcaaatcgattagaaatttgggacaaagcggtctgggaagagtatttcaatgcatcagaagattctttctctgaaatcgcggagagtatgatggatttcgatttgtagaaggtcaatatggaatgaaggttaaggtgtcgctatgtttgaacacattacagtactaaaagaagaagcggtaaacgcactaaatattaaagaagatggcatttatgttgactgtacgcttggtggcggcggtcattcaaaagcaatcctggataagcttaccacagggcacctctatgcttttgatcaggatcagtgggcaatcgataatgccaaagcaacacttgcaggttatgaggagaagctcacggttatcgaacgaaactttagctttattaaagaagcgttagctgacctcggtgttgaaggcgttgatgggattttatttgaccttggtgtttcctctccgcagcttgataaaggtgagcgggggtttagttatcagcatgatgcacagctggatatgaggatggatcaatcttccagtttatcagcgtacgaagtggtgaatgagtgggagtacgaacgtctcgtctcgatttttttcaaatttggtgaagaaaagttttcaaaacaaatcgctcgcaaaattgaaaaagcaagggacttaaaaccaattgaaaccacatttgaactcgttgatctcattaaagatgctattcctgcacctgcgagaaggaaagggggacatcccgctaaaagaatttttcaagcgattcgtatagcggtaaatgatgagctgaaagtatttgagcaggctctaattgacggaatgtccattttaaatccaggcggacggatgagtgtcatcacattccattctcttgaagatcggatttgcaaaactacgatgaaagaagcagcttcggggccagaacttccaccaggaatgcctattatcccagacgcataccagcctgatatgaagcttataacaagaaagccaattctaccatctgaagaagagcaggaagcaaacagacgtgcacgatcagcgaagcttcgtgtggcagagaaaatgtaaatataaaaaataaaagaaggtgcaagggggaaaatgatgagtaacctggcgtataagtatcagcagcagcatcaaacgcaaaaacaagttgaaacaaaaaagcaagcggtttatgtagaacgtggacgtattacaaagggagagaaaatgctctggatgatgcttgtacttacgtttgtggccgcgtcaatctttatggtttcaaattatgctacgatttataatttgaatacgggtctgcagcaagcagaagcagatcaacgtgctcaagtgaaacagaacgaagagcttcaagtgaaagtgactgagctaagtgcacccggtcgaattgtgaacattgccgaagaaaaattaggcatggagctaaatgatcaaaacgtagaagtgatcaacaagggatcataatttcggaggtttgcactgtcatgaaagaaacaaacaagaactcacatattaatgttggagcagcgattttaatgttactatttgtcctgctcttttttgcttttattggaaggtttttctatattgaatggacgcaggcagtttcgggttccgatggtgaaaaggtggacttaatggagcttggaaaagataagtggacgcgaagcaagattcttgaagcggatcgcggtacgatttatgaccgcacaggagaaaatgcgctcgccactgacattccttcatttacactgcgagcgattttagatgaaaattatgaagatcatgtaaaagatgtttcaaaaactgcggctgctcttgcgccgattctagagatggagcaatccgacgttaccgaaatattatctagagaagaactatttcaagtggagttcggagcatctggaaaaaatttaagcctcactcaaaaagaagaaattgaaaaacttgacttacctggagttggctttattccaacgaaaacgcgcctctatcctaacgaagagtttgcttctcatcttcttgggtttacaaacgaaaatgaaaaaggtgtccaggaaggcttgttaggtttagaaaaggaattgaataaatatcttgttccgcaagaagggaaagaaacgtatcaaagtgatcgggaagggtttaaacttccttatggaaatgaaaacatcacaccttcaaaaagtgggaatgacgtctatttaacgattgaccaaaaaatacaggtattaatggaaaacgcattaaatgaagcgcaggagaaatataaccctgagcgaatgacggccatcgttgccgatccggatacgggtaagatattagcgatgggaaatcgtccaacgtttgatcccaatttaagagatgtttcaaattatacaaatatggcattaactgcatttgagccaggctcaacaatgaaagtctttaccgctgcagcagcgattgaagaaggcgtgtacaacggagatgaactttttcaatctggacaatattctgtaccaggtggtcggataagtgatcacaacggtggagaaggttggggcatgattagctttgatgagggaattcgtcaatcctccaacgtagcagcatccattttagtgaaagaaaaactgggttatgacaaatacgaagattatataacgaaatttggattagatgctaaaacgggaatcgatcttcctggagaagcttcttcgagaattacttatagtggagagcttgaacggataacgactggtttcggtcaagggtctaccattacaccaattcaacaagttcaagcgattactgcaattgcaaacggtggaaagatgatgcaaccttatgtaattgagaaaattgttgatcctgaatcaaatgaagtaaaacttaatcacgagccaaaagtagcgggagaaccaatttcgaaagaaacagcaaaacaaactcgcgatcttttacgcacggttgtgacagatggtacgggaacaccatataacattaaaggttacgagattgctgggaaaacaggtacagcacaaatttctgaagggtcaaaaggatatatgagtggatacggaaacaacatcttctcatttattggaatggctcctgcagatgatccagaattaattgtttatgtggcggttgatcgacctgaactcgagtatccggagctaggaagtgaccctgtttctctcatctttaacacggttatgaaaaatagccttcaatatttgaatatcgatccgattgagaaggaagataatgcttctgaggaagctgaagagacagaatccggtcaaatattaaaagatgtaacgggcatgagtgtaaaagaagctaaaaagcagcttgaagacaagggcttatctgtcgtatcacttggtgagggagaggttgttggtcaatcccctaggccgagtgccaaaattctcaatggtgaacgaattattttgcaaacggaaggtaacgccacaatgcctgatataacaggctggtctcttgcagacgtaatgaagctcgtcgagttggttgagttaaaaccaaatgtgatgggatcaggctatgtggtgaagcaaggaattgaaacgggaagtacgatcaaaaaagatgactatcttgtagcagaattaaagactccttcttctgaaacggaagaggaagaagagccagaagaagaaccagaaccaattacggactagcaggtctatccttcgaaccgaacacatatagtgaaacgagcataatcagggaggatgagtttatgcgcgtttcgaatgtcactgttcgaagaagacttgtgatcgcacttattgttgggctatttgtttttgctgtagttgttgtaagactcggttatgtacagcttgttatggggagctggcttagtgagaaagcgaaggattcctggagtcgaaacatcccgtttgaacctagcagaggagaaatcctggatcgtaacggcgtagcacttgccacaaacgtgagtgctccgtctgttttaattgttcctagacagctccaaaatccagctgccactgccgaagctctagcagcgtccctcaatactagcaaggaaaaagtttatgaaacaatcactcagaatgaatcgatggtctggattcgacctgaaggtaagaaaatgacaaacgagaaagcaaatgagatccgaaaattgaacctagctggagtttatattgcagaagataacaaacgtcactatccaaatggcgattttttagctcatgtgcttgggtttagtggcattgataatcaagggctaactgggatcgagctttattatgacgctgaattaagtggggaaaaaggacaggtggaatattatgctgatgcgaaaggaaagcgaatgccttccctagcagatgattacacagaacctatcgatggacttgatcttcggttaacgattgattcccaaatccagacgattatggaaagagagttagatatcgctgaagcaacctatcatccagatggcgcagcggccatcgcgatggatccaaatacaggtgagattcttggaatgtcttcaaggccagattttaacccagaagaattccaggaagtttctcctgatgtttggaaccagaacaagcctgtgtggagtacgtatgaacctggatcaacctttaaaataattactcttgctgcagcacttgaagagggagaggtggatcttgaggaagatcatttccatgacccaggtagcattgaagtggcaggaacaaaattaaggtgctggaaagctggagggcatgggagtcagacgtttttagaaggcgtacaaaactcctgtaaccctggttttgttcttttaggtgagcgtcttggcaaagaaaagcttttttcctatattgataaatttggcttcggtgacaaaacgggaattgatttacaaggagaagcaagcgggattctttttgatgttgaaaatgtcggcccacttgaactagcaacgactgcattcgggcagggcgtttccgttacgcctatccagcaagtgacggctgtttctgcggccgtgaatggtggcacgctttatgaaccatatatcgctaaagaatggctggacccagaaactggggcagttgtaagcaaaaacacgccacaagcgaagcgacaggtaatctctgaggaaacttctaaagaagtaaggcacgcgcttgaaacggttgttgcactaggaactggaaagaacgcctatgtggacggttatcgcgtcggaggaaagacagggacagctcaaaaggctaaagacggagcttatctcaaaaataatcatatcgtttcatttatcggttttgctcctgctgatgacccccaaattgtcgtatacgttgcgatcgataatccgaaagatacccttcaatttggagggattgtagcggcaccaattgtaggtaatataatccaggatagtttgacggttatgggtgttgaaaaaagggaagaccagattgagaaagaaacgacatggcaggatgaagagatgattgaaatgccggatttagtgggtatgtcatcaaaagagattcgtgaagcgatgtataatttgaaaattgattcaagcggggaaggcgatattgttgtagcccaggccccagaacctggtgtgaaattacctgttggttcagaaattcggctttatatgggtgacaaataagcgaccggtgagtacaataagtagtgaacaagccaaggcgtatgctcttggcttgttttctgaaaatatgtcagcaaactagaaaggtttgaaagaaatgaaattaaacgatcttcttcatgcattacttacatataaacaggtaggaaaaggcgatccagaaataaaaacgattgaaagtgatagtcgtgccgtaacagatggcagtctcttcgtttgcattccaggttatacggtagatgggcatgattttgcagaacaggctgttcaacagggcgctgttgctcttatatcagaaaaagagctttctgtttcagtacccgtaattctagttcatgatgcgcatcgcgccttagctgaacttgcaaatcgtttctatcaccatccgacgaaatcattttcattaattggcattacaggaacgaatggaaagacaaccgtttcccatttaattgaacagatacatagagataaaaagcaaacaacagggttaatcggaacgattaatatgaaaatagccgatgaagaatttgaaacgaaaaacacaacgccagaaccactcttgcttcaaaagcaatttgctagaatgcgcgattgtaatgtggatacggccgttatggaggtctcttctcatgccttaacactaggacgcgtgagaggttgtgattatgatattgccgtgtttacaaatttgacgcaggatcatcttgattaccatggtacgatggaagaataccgtcaagcaaaaggtcttcttttttcacagttaggtaatacatatgatacagggagaaaaaaggtagccgtccttaatgtagatgatgacgttgcacagcagtatgaacaaatgacatctgcccatattttcagatatggcattgatcgtcctgcagatattaaggcagataatatctctttttctgcgaatgggacaagatttcgcttaagtacgccagaagaaaaccgtgacgttaaattgatgctaacaggcaaattcagcgtatacaatgcactcgcagctattgcggcttgtcttgcaaatggtttagatcttgatcatattttgaatagtcttgagaaaatcgcaggcgtgcctggacgttttgagctagtagatgaggagcagggcttcccagtaatcgttgattatgctcacactccagatagtctagaaaatgtcttattgacagtaaaagaaatgaccaaaggaaacgtctttgcagttgttggatgcgggggagatcgtgatcgaacaaaacgaccactcatggctaagattgcaaccgaattagcggatactgctgtactaacatcagacaatccacgaagtgaagacccagaacgcattttagatgatatggtcgaaggtgtgaaaggtcactatgtgcggataacggatcgctcagaagcgattcaacatgcgattgcaaatgctgctgatggagatgtggtccttatcgcaggaaaaggacatgaaacctatcaaatcattggtaatcaagttcttgattttgatgaccgagagatcgcacgtcaagcaataaaggagcgaaaaggatgaaattttcatcggaattactaaacaaaattagtcatggaccagttgatcacgaactggtctttgaaggtgtggcaaccgatacgcgtaaggattgcacaaataaactattcgtaccaatcgttggtgaagttttcgatggacatcgttttatcgatgctgccatcgttaacggtgctaccggaacactttgggataaaagcaaaccatttcctaaagaccttgtcgggaaaatcaatgtttatgaagtggatgatacgacagttggattccaggagttagcgaaacaggtcctaaaacagcaaaaaccttatgtgatcggtgttacagggagtaacgggaaaacgaccgttaaagatatgcttgaggctgttctaagtccaaaatataaaacatttaaaacgcaaggtaatttaaataatcattggggactgccaataactgtgcttgcgatgcctgatgacacagacgtgttgattttagagatgggaatgagtggtcccggagaaatctcccttcttacccaaatcgcacagcctgatgtagcagttattacaaatatcggagagtcacatttacttcaactcggtagccgcgaaaatattgctaaagcaaagatggaaattgctgagggacttaagtctgaaggcgttctcgttattgatggcgatgagccacttctgacaccggttcataaaaatgcgatttcttgtgggtatgaagaccaaaacgaccttcaaattgatcgtattgaaaagagagaaaatggctttgtgtttactttaaaaaatgaaaaagagccgttcgaaatttctttgttaggtaaacataatattaaaaatgctgtttatagcatcgcttcagcaagaaaactcgggatgacagatgatcaaattcgcaaatcgttatcttccttaacgttaactggaatgaggcttgaaaaattccggtcatctactggtgcgttaattattaacgatgcatataacgcaagtccaacctcaatgaaagcagcattagaaacgctcgctgagttagaaggctttaataaaaaaattgctattcttggtgatatgtatgaactcggggatcaggaagaatttcttcaccgggacattgcaaccgcggtaaaaccgtctattacagaagtgattaccgttggtgacaaagcaaaatggatttatgatgggatgacggaaaatgaaacgcaagtatctgctgtttcctttgacaacaaagaagatgccgcatcatatttatcaggtcgacttgatgatcaaacagctgttttattaaaagcatcaaggggacttggactcgaaaccatattacaggcattagggaaagaatcataaggaggcagtacagtgattgaacaattattaatttttagtttgctaacatcatttataatagcagtgcttgtatcaccggtatttatcccttatttaagaaggcttaaatttggacagagtattcgagaagagggaccaaaatcacaccaaaagaaatctggtacaccgacaatgggtggcctgattattattcttgcgattatattaggaacggtgatcattgcgctaaaatatgacgagatctccacccaaatctggctacttttgtttgtgaccgtggggtatggtcttattggctttttagatgattttattaaagtagtgaagaaacgtaaccttggtttaacctcaaagcagaagttgctaggtcaaatggttatcgctatcctcgtttactttggtttaagaaccattggctttgatacggcgattcgggttcctggtacagaaattagctttgatattggcattgggtatgttgtgttactgtttgtgatgcttgttggcgcatcgaatgcggttaacttaacggacggattagacggtcttgtcgcaggtacagcagccatagctttcggagcttttgccattttagcagcttcggtttatatgtatgacgtagccattttctcagtaagtgtcgttggtgccgttcttggattccttgttttcaatgcacacccagcaaaagtattcatgggtgatacagggtcacttgctcttggtggcgcgcttgccgctgtagccattatgaccaagcttgagcttctcctagtgattattggtggtgtctttgtcattgagacattgtcagttattattcaggttgcatcatttaaaacaactgggaagcgtgtgtttaagatgagtccgcttcatcaccactatgaactttctggttggacggaatggcgcgtcgtcgctacattctggactgtaggtttaatttgtgcagcatttggaatctatcttgaggtgtggatgtaatgaaaaaagtaaactatgaaaataaatctgtactcgtattaggcatagcgaaaagtggatttgcagcagcaaaattgcttcgttctcttggcgcaaccgtaacagtcaatgatcgagagcaagttgagaataatccaaaagccattgaacttcaggaattaggttttgaagtgattggtgggggacacccgctcgagctacttgagggaattgacttaattgttaaaaatcctgggattccatatcaaaactcgctccttgttgaagcagtaaaaagagatatcccaatcgtaactgaagttgaaattgccggagagatttctgaagcgccatttattgcgattactggttcaaacggaaaaacaacaacgacgactttaattggtcaactactaaatcaaacgccggctaatccgatcgtcgctggaaatatcggaacggttgtttgtgaagtagcagccgaagcaacacctgatcaaacgcttgtaacggagctatcaagctttcaattacaaggcacggtaaatttccatccgcatatttcggttcttcttaatctttatgaagcgcatcttgattatcatggtacaaaagacgcttacgcagcagcgaaagcacgtatgttccaaaatcaaacgcatgaggattttgccgtttataatgcagatgattcgctagtttcttcgtttgcagaagcttcaaaagcttctcttgttccattttcagctactaaaacacttgatgatggtgtttctattgaagatagttggattgtatttagaaaagaaaaagtgatcaaaatagatgaactatccatgaagcagaacattgagaatacacttgccgctattgctgtagcaaagttatccggtgtgtcgaacgaaaaaattcatcaggaacttacgaattttcacggcgtaaaacatcgccttcaatttgttggcgaagttagtggacgtaaattcttcaacgattcaaaagcaacgaattcaatcgctacaaaaaaagcgttagattcatttgagaagcctgttatccttcttgcgggtggcctggatcgtggaaatgactttgatgatttaaatacctattttcaaacaaaagtaaagcacttaattacgtttggggaaaccgcctcgaaattgaaacaaacggccaaccaagcaggactgaattctgtcacagttgtcgataatgtagaagaagctgtttcgacagcgtatcatctatccgaaacgggagatgttattcttctttcaccagcttgcgcaagctgggatcagttcaaaacgtttgaagagcgaggagacatctttattgaggcaatgcatagactctaatgaggggttgtcttgcttatccgcgaagttcggttaggtaaaatcgacataacggagtgtgggtccattgccgaaaacaaaatcaacgccagacctggtctttttaactgcaacacttgttctgttagcaattggattaatcatggtttacagcgcaagcgccgtatgggcctcctataaatttgacgatgcgtttttctttgcgaagaggcagcttctttttgcaggcgtaggcgtggctgccatgttcttcgttatgaacgttgaatattggacgtggcggacatggtcaaaggtaggggtgctcatctgctttatccttcttgtcttagtacttattccaggagtagggcttgttcgtggaggagcgagaagctggcttggtgttggtgcgttttcgattcagccttcggaattcacaaagcttgcaatgattgcttttcttgcgaagtacttatctgaaaatcagaaacgaattacgtcgtttaaaaaaggtcttgttccgtcactcggtcttgtctttgttgcatttggcatgatcatgcttcaaccggatcttgggacaggggcagtgatggttggaacgtgcgttgtgatgatttttatttcgggcgctagaattgcacattttgtctggcttggtatgcttggtttggtagggtttgctgtactcattttatctgcgccataccgaattgcgagaattacatcttaccttgatccgtggagtgacccattaggtagtgggttccaaattattcagtccttatatgcaataggacctggaggtttgatggggcttggtctagggcagagtagacagaagttctattatttacctgagccacaaacggatttcatctttgcaatattatcagaagaacttgggtttattggcggaagctttgtgatccttttgtttgctcttcttctctggcgaggaattcggatcgccttacgagcacctgatttgttcggaagcctccttgcggttggaattattggaatgcttgcgatccaggtcatgatcaatatcggggttgtgaccggtttaatgcctgttacagggatcacattaccttttcttagctacggaggatcttccttaaccttaatgcttgttgcgatgggcgtcttattaaatattagtcgatatgcaaagttctaagcggtatatgtcgtaaaagcgctcattttgagcgcttttttcaatgttttgtaactgtttttttcattgactgaaccatttataacaaacaaaaaatctttgtgggaatacggtgatatttctctgggatgaatttccttcaagaggataataagtggtaaacttatgctataatgattgaaataagaactatctgctggatcatgccgttcggttgccatgataagcgtttttacatcttaaggatagacagaagttcaatcaccggagacggaggcaagacaatggaagatcgcaaagttgtaacaattgaagaccggatccccacactgaaagcacagcggaagcagcgtgcgaatcgaaggttggttgtatatctatcaatctttttctttcttattttgctgatcatttacttccaatcttccttaagtcatattcggaacgtagaagtttctggaaataattacgtttctgataaagaaatcattctgttgagcgaactagataatagcgtaagcttttggaacttaaacgctgagaaagtggaagagaaggttgagcagtcgaaagaaattgcaaatgtaactgtcacaagacaatttccggcgactgcaaaagtgaaagtggttgaaaatgcgcgtgtggcatatttgaaaaagggtagtcagtatttcccgattttacaatcaggtgcgattcttgatgcgcttcctaaaggagatacgccagtaagcgctccgatcttaatgcagtggaatgaaagtacccagctatctgaaatggcaggagagcttcggaaggtaaatttaagtataattaatcgtatatctgaaatacactacacgccggatggcgataaagcgtttaacttaacactttatatgacagatggttatgaagttaaaacaagtattgctgatttttctgagaaaatgaatagttacccgctaattgtagagaagcttaaggataaagctaaaggaattctttatttgaatgagggtagttggctagagccatacgaagaagttcctacgaatgatgaagagaaaaaagagacttcataaaaatgtacgataatacttgttcgaatggacagggaatgattttcattaacgaacggttataaacagggtatcgcataagaaaaccacttaataacatagcagaatgaaagaaaacaacaaatttcttttaaatacgtgaaacagtgacttttctactgctttcacatggtgtagactaataggtatgcactgctttagactaactcttcttgtaaatggaaagtaggcgaggagagtaggggtttgttacccaaaaaaatgagagtaattctcgtataaaagaagggaaataaccggatttgtggaatagagtccttatatcatattcttcctgggacttcatgaagcaaggcttgaggaagtttagtttgaatcaatgttgtgtatataaaggtgttggacattttttcaaccctattatagagaaactattaatacctgaatatggtagcattttgaaggaggtgccaggagaatgaacagcaatgagatttatgtgagtctagacatcggtacatccaatgtgaaagtaatcattggccagatgacgaacgattctttaaatatactaggagttggcagtgcgccttccgatgggattcgtaaaggatcgattgtggatatagatgaaactgttcgttcaattaaacaggcagtagaaaacgcagaaagaatggtaggtttatcggttcgttctgtgattgtggggatcaacggcaatcacgtacagctacagccctgtcatggggtagtagcggtatcaagtgaggatcgtgaaattcatgatgaagatattgctagagtaattgacgcagcacaggttgtttctatccctcctgagcgagaaattattgatgtgattccaggtcagttcgtggttgatggactggatggcattacggatccgcgtggcatgattggtgttcgccttgagatggaagggacaatcattacaggttctaaaacagtattacataatttattaagatgcgtagaaaaagcgggtcttgaaattgctgatatttgtctacaaccgcttgcatgtggatcaatggccttatcaaaggatgagcgtaatcttggcgtagctctcgttaacatgggtgctggttcgacgacgatttccatctttgaagaagggaacctgaaagccacatccgtcttacaaattggtggcgatcatgtaacaaaagatatttcgattggtcttagaacaacgactgaagaagctgagcgaattaagatcaagcacggcaatgctttcgttgatcttgcttcagaagaggaagctttcactgtatccacaataggcagttcggctgaacaagaatttaatcagtacgaattagctcatattatagaacctcggatcgaagagatgttagaattgatagaagacgaaattaagcgaatgggaattcgcgaattgccgggcggatttgttctaaccggtggtatggtcggaatggacggtgtacttgaacttgcacgagaaattctgcaacataatgtacgtgttgctgtcccagactatatcggcgtacgcgaaccgcaatatacaactggcattggtcttatccaattcacgtataaaaacgtgaagattcagggtaaagaagtcgcagcatcacttaaccctgaagaagaagtgaagcccaagcgtagaacaaaagccgaacctcaaccaggtgagaaatcttcttcaccaggtatgaaagagaaagtaaagaatttctttaatctatttgttgaataaagggctattacaagattaggaggacctgagatgttagagtttgatatgaatatggaacaattagcacagataaaagtaatcggtgtcggcggaggcggaagcaacgctgttaatcgtatgattgaaaatggtgtacaaggtgttgaatttattgccgttaacacggatgcacaggcattaaaccttgctaaggcagaggtgaagatgcaaattggtggtaaattaacaagaggtcttggagctggagctaatcctgagattggcaagaaagctgctgaggaaagcaaagaacagatccaggaagcactcagtggtgcggatatggtatttgtcacggcaggaatgggtggcggaacaggtactggagcagcacctgttattgctgaaattgcaaaagaacttggcgcattaaccgtaggtgttgtgacgcgtccatttacatttgaaggtaaaaagcgttcaacacaagctgttacaggtattgcaatgctgaaagaaaaagtcgatacgttaattgttattcctaacgatcgtctacttgaaattgtagacaaaaatacgccaatgcttgaagcattccgtgaagcggacaacgttcttcgccagggtgttcaaggtatttctgatcttattgcggtaccaggactgattaaccttgactttgccgatgtaaaaaccattatgactgaacgaggttctgctctaatgggtatcggtattgcaactggggaaaatcgcgcttctgaagctgctaagaaagctatatcaagtccacttcttgaaacatcaattgatggagcaaaaggtgttctcatgaacattacaggtggttctaacctgagtctttatgaagtgaacgaagcggctgatatcgtttcttccgcatctgatgagaatgtgaacatgattttcggttctgttattaatgaagatctaaaagatgaaattctcgttactgttatcgcgacaggatttgacgagaatgagaataagaaaaagacggttccacgtccttctgctcagtcgaagcaaagcgctccgattcagcaacctaagcacgaggaagaagaagcacagccggaaccatccaaatttggcgcgcgcgctgacgaatccaatgacacattggacatccctacgttcttacgtaatcgtaaacgcaatcgacgctaatatgaaaaaccagctcttttttgagctggtttttttattggagaaatttagcgtcactcattaatagttatggagtctgaacttaaaatgactgcgctttctattaaaaatgtgagttgatttcctcttctaacatttgttaacatagataaaattatattttttctgaaaatggtgttgtgttcatgggcaatcacacgtataatgtccattatataaaaacaagtgtcctcaccagaaggacaaaggagtggagagaaaatgaaggattgcgtatcagttggattattaggactaggaactgttggtagtggtgttgtacatatgattgattctcatcaaaaggaattgcagcagcgagtaggctgtgaagtgaaagtagccaaagttcttgtaagagatatggataaagcacgaagcgtagatttagatgaaagtgtacttacacttgatccagaggatgtcatcaataatccggaagttgacgtagtgattgaagtaattggtggcattgatcaagcaaaagaattcattctttcatcacttcaaaatcataaacacgttgtgactgcaaataaagacttgatggccattcatgggcgtgagttactaagcgctgcggttgagaatgaaagtgatcttttctacgaagctagtgtagcaggtgggattccgattcttagaagtttagtagaaggattatcttcggaccgcattacgaaattaatggggatcgtaaatggtacaacaaactatattttaacaaagatgacaaaaaataatgtcccttacgatagtgttttaaaagaagcacaggagctaggctttgcagaagcagatccaacagcggatgtagaaggactggatgctgctaggaaaatggttattcttggaacgctcggcttttcaatgaaagtaggtttagacgacgttaaggtagaaggcattactcgagtagatgaagatgatattgcttatagtaaaaagctaggttataccattaaattattggggattgcaagttcaacagatggttcgattgagttatcagttcagccaaccttgcttccgtcaagacacccattagcttccgttaacgatgagtataatgcagtctatgtatacggtgaagcagttggagaaacgatgttctacggccctggtgctggtcagctgccaaccgcaacggctgttgtatcggatcttgttgcagttattaagaacatgagactaggcgtgaatggaaaaagtgttattcttccacagcatgatcgcaagcttaaagatgatgagcaaatcaaaagtaaacattttattcgcttgattgtaaaagatgaacctggggccttctctaagatttcacacctctttcaggatcgcgggttaagtttagaaaaattaattcaagaacctgttgtcaataagggaactgctgagcttgtcatcatcacacatgaaacaaatcagaaagcatttgaggacgttcataatcgattaagagatctggatgttgttgtagaagtgaaaagtcgctaccgcgtggagggaatgtaatgagctggaacggactaattaagcattataaagagtatttacctcttacagaggaaacgccgcagctcactttaaatgaagggaatacccctctcttaaagcttgatcagctgtcagacgaacttgggatttcactgcacgttaaaattgaaggggcgaacccgactggctcatttaaagatcgtggtatggtgatggcggttgctaaagcgaaggaagaaggcagtgatgcgatcatatgcgcatcaactggtaacacagccgctgcagcagctgcctatggagcaagggcaggtttacgctgtatcatcgttattccaaaaggaaaagtagcgcttggaaagctagctcaggcaatgatctatggtgcagaaatttttgagattgatggaaattttgatgaagcgttacgaatggttcgtgatattgctgaaacagaaccgattgcactcgtaaactctgttaatccttatcgtttagaagggcaaaaaacagcggcttttgaagtgtgtgaccagctaggagaggctccagaagtgctagctattcctgttgggaatgcgggtaatatttcagcttattggaaaggcttcaaagaatatgtcacagaagaaaatcgcccacaaatgcgaggatttgaggcagaaggatcagctgcaattgttcaaaagaaaatcattccgaatccggaaacgattgctacggcgatccgaatcggcaatccagctagctggcatctggctgaggaggctgttatcgagtcaaaggggaaaattgatagcgtaacagatgatgaaatcctgcatgcttatcaggaacttgctaaaaaagaaggtgtctttgcagaaccagcttcatgtgcttcagtggcaggagtgatgaagcaagttgcttcgggtgaaattaagaaaggaacaaaagtagttgcggtcttaacaggtaatggattgaaagatcctgcaactgcgatggacaatgtgatcgcaaaaccacgagttgtcgcagcggataaagcatcgtttcttgaagaacttaagggatgtgtcagccattgataaaagacgaatgtctttacttgaaagttccaggaagcacgtcaaaccttggaccgggatttgattcaattggtcttgccattaatcgttatttacatgtaaaaatcgaaccttccacagaatggtcttttcactatattgattttgatgaccgttttccatctggaaaagacaatatgatctatcaaacaattgaagaaattgagagaaagtatgggaaagggaaagaggcgaggcctttcgctgtcacgatgacaagcgagcttcctctagaaagagggcttgggagtagtgcagcagcgattgtagcggctgtagaaatagcagattatgcaatggagcttggtctaacgctagaagaaaaagtgcaaattgcgacgacgtttgaaggccatgctgataacgttgctgcctctctttatggtggtttagtcatcgctacagggcaagagggtttagacacgatatcacataaggtaaaggatttagaaatggtagccttaattccaaatcataaattgaaaacaacagattctcgttctgttcttcctaatatgctaccttatgaggaagctgtggaagcgagtagcattgcaaatctttttattggggcagccctccaaaataattggaagttagctggtaaattaatggcgcgtgatctttttcatcagccatatcgaaagcaccttgtacctgaccttgaacaagtccatgaatttgcaataagtcatggcggatatggtgctgcgttaagtggagctggacctacattagttgtctttgctccgagcggctcctcagaatatcttcaacaatcgttagcaaagcgttttccattataccaatgcgaagtgcttcacccaacgtctaccgggatagaagtaaccgtcggagcatatgaaaatcaatcaatctaagaagcagtcgccctccagaagggcggcttttttctattttaaagggacagttgatggctgacaaaactagtgataattatccaaaataacctcagtctaaccggcacaatctgacaggtttatctgtcaaattagtctatacttagaatcaaaatcgcaaggggggatgtactcagtggcagtataccttgatgtgatttggctattgaatttttgtttcgattatatgctacttgcgctaaccgggatactgctaaagaaaaatgttaagaaaagacgacttgcgacaggtgcattagttgcttctttttacgttctttttctttttgttccatcattgagttttatgacactgccactgatgaaattactttactccttcgtgattgttttcatgacgtttggatttactcggttccgtagtttttttcaatgctggcttcttttttactttgttacgtttatgatcggtggaggaatgatgggagctcattacttttttcagcaagacgtgacggtcgttaacggagcaatcgcgacaaaaagtactggatttggtgatccgataagttgggcatttgtcttaatcggtttccctttagtatggctcttttcaaaaagaagagttgagaaacttgaaacaacgcgcattcattttgatcaattggccaatgtgacaatccgaattgatgaggtgacaatttcagcaactggattgatcgatagtggcaaccagcttcaggatccgttaagtggctcaccggtaatgattcttgatatgaccgtacatgaatcaaatttcccgccaactttaattgagaaagcaaaaaacattaccgaatttcaggaagagggagagggggatcgctgggaacacaggttacgaattgttccttttcgagcagtcggacaagatcaccaattcttgtgtgctgtaaagccggatgaagtgatgatctcattagaaggtcgttcgttaacagtaaagaaagtgcttattgggttaagttttcattcaatttctggagaaaaagattattcgtgcatacttcatccgaaaatgctgacaggacataaggcgactgcgtcatagaagataattcaagacgatcaaggaggagttttggatggggaaaataagaattaagattgttctctggtggcagcggattttaatgaaattaggaattaaacctgatgaaatttactacataggagggagcgaagcgcttcctcctcctctatcgaaagatgaagaagcacatttgttaattcagttacctaaaggggataaagcagcaagatcaatcttaattgaacgaaaccttcgtttggttgtttatatagcgcggaaatttgagaacactggaattaatattgaagacttgataagcattggcacgataggcttaattaaagctgtgaacacgtttaatcctgagaagaagatcaaacttgctacctacgcttcacggtgtattgaaaatgagattttaatgtttttgagaagaaataataaaatccgatctgaagtatcgtttgatgagccgcttaatgtggactgggatgggaatgaattgcttctatcagacgttcttggtacggatgaagatatcattacgagaggaattgaagctcgcgttgatcgtcgtctgcttgtaaaggcgttagaaacactaaatccacgagaaaaacaaatcatggagttaagatttggtttagcgggagaagaggagaaaacgcaaaaagatgtcgccgatcttcttggtatatctcaatcttatatttctaggcttgaaaagcgcatcataaaacgtcttcgaaaagaattcaataaaatggtctaagcatgttaagagaatagatgcataaaattcccactcgcggagatactttactttgacagcatctccgatgaggagggaatgagttgacacgaaacaaagtcgagatttgtggagtagatacctccaaacttcctgtacttaaaaatgagaaaatgagaattctttttaagcagatgcaggaaggggatatatcagcacgtgaagaattagttaacggaaatttaaggctagttctaagcgtgatccagcgattcaataatcgaggagaatatgtggatgatctttttcaggtagggtgtattggcctgatgaaatccatagataactttgatttagggcaaaacgtgaaattctctacttatgcagtgccgatgatcatcggtgaaattcgtaggtatctccgtgacaataacccgattcgggtttcgcgatcattacgggatatcgcttataagtctctccagattagagataagttaatgacaaaaaattctaaagaaccaaatcccaccgaaattgcaaaagagctaggcgtaacgaaagaagaagttgtgtttgctcttgacgccattcaggatcccgtttcattatttgaaccgatctataatgatggtggtgatccgatctttgtaatggatcaaatcagcgacgataaacaaaaagatattcagtggttagaggatattgcacttaaagaggcaatgactcgattaaatcaacgagaaaatatgattttacaaatgcggtttttccaggggaaaacccaaatggaagtagcggatgagattgggatatcgcaggcccaggtgtctcgtcttgaaaaagccgccatccatcaaatgaataaaaatattcaaagttagaatgagacctgagaaacaggtcttttcttttgcctgcatttcatataatgagttgaaaggtgggtgcgtcatgataaaaatttctgaatttcaggtcaaagatgttgtgaacgtatcgaatggacgaaagcttggtcacatcgctgatctggaaattaatttaactacaggtaaaatagaagcgattgtgattccgggtgcaggtaaaatgatggggttatttgctagagaaagcgatgtcgttattccgtggcgaaacattgttaagattggttcagacgtgattttagtaaggcatcacgatacggcagatggcgaatcttttcagaaagaatcgtaagctcagaaagatgtaacaatctatctcccttagcttcaacatattatgataaaataaggtataaactgtatcatggtataaaggggtgcaactgtggcgaacgaaccatttcaagcaacaatgaaacaaacttcactggaactgaaatttccagatcaagctgagcgaaaaaatcaaccaattgcaggtttttcgactcgcagaaacggagttagccagactccgttttctagcttgaatcttggatttcacgtaccagatgaagcgaaagatgtgctcgagaaccgaaaaattcttgctggtgatattgagcgaccattaaatcagtgggttgttggagaacaaatccatggcgcggctcttgcaaaaattgtttcagaggataaaggacgtggatcagcggatcatcacgatgcgatttcaagcgttgacggtctatatacagacgaccaggatgttttattaacggctctttatgcagactgcgttccattatatttttatgccccaaaagcgaatcgggtaggtcttgcccacgcagggtggaaaggaacgacgaagaatattgctggagagatgatcaatgcctggaaggaagatggtataaaggctgaggatattcatgcagcgatagggccatctattgggaagtgctgttacgaagttgatgatggagtagtcaatcaggtcaattcactacttttaaataaagcttcactgtatgaagagacgtcaaaaggaaaatatcagcttgatttaaaagctgttaatcgggaattacttctaaaggctggtgttcaatcgagtcatctatcaattagtagctactgtacaagctgcagcaatctgtttttctctcaccgaaaggaagaaggaaaaacaggaagaatgatggcatacataggactcggggaggtatagcattaacgtggatgtaagagaaagtttagctacaattaaaaaacaaataaacgcagcagccgaagcttctagccgaaacccagagcgagtaaacgtggtagctgttacaaaatacgtaagtgttgaacgtacaaaagaagcactcgatgcaggattaacgcattttggtgaaagtcgtgatgaaggacttttagaaaaagtggaagcacttgggacaacgccctcctggcactttatcggaacgctacaatcacgtaaagtaaaagaagttcttccgtttgtagactatattcattcacttgatcgtcgttctttagcaaaagaaatacagaaacgagcggatcgtgaaataaactgttttgtacaggtgaacgtgtccggggaagattccaagcatggcttatcattagatcatacgattccttttattgaatcgctgaaagagttctcatcgattaaagtgatcgggttaatgacaatggctccgcatacagacgatcgaaatgaaattcgatcagtctttaagcaactccgagagcttggagaacgtattcaaaacctttcactcagtcatgctccatgcaacgagctttcgatgggcatgtctaacgattatgaaattgcagttgaagagggtgcaacatacgttcgaattggatcgtcacttgtcggtaatgaaaaataaattaagctctccaggaggtgcagggaattgggtattaaaacgaaattcaaacagttctttgaacttgatgatgagacgatagaattggatgagcagcaggagaacgaagcatatatggaggaagaagagtctgaagtaaccagggcaaatcgaaaaagcaaacaaaatgttgtcagtcttcaaagcgttcataagaactcaagagttgtgctagtggaacctagagtgtatgctgaagctcaggatattgctgatcatgtgaagaatcggaagtccgttgtaatgaatcttcaacgtattccgcaggatcaggcaaggcgaattgtcgactttttaagtggaaccgtctatgctgttggtggcgatattcaaaagctcggtccggagacatttttatgtaccccggataacgttgaaatttcaggaaatatcacagatgaaatttatgaagacgagtaagtaagaaagggtgaaaagtttgaacattgcttcaatcttaatttcagcagtacaaatttatacgtggattctcatcatttacatttttatgtcatggattccaaatgcaagagaatcttcaattggccagatgatcgcttcgatcgcagagccataccttgcaccgtttcgcaagtttattccgccaatcggaggcatgcttgatatttcaccgattgttgcgatttttgcgcttcaattcgtccaatacggaatcgctgctctctttagtttcgtaagttaatgtcgatttacgaacattaccgccctgaagaacggacgtttgtggatcgcgttttgcagtggcaagatgaggttcaggaaagatatgcgcccagattaacagattttctagatccgcgagagcaggatatggtaagacaaatcataggaaatcatcctgatgtgggagtgtttttctcaggtggagttgaagggtctgaacgtcaaagggctcttcttgttccaccttactttgagccttcaaccgaagatttcgatataacagcatttgaaattacatatccagctaagttcgttacacttactcatcctgatttgcttggcgcaatgatgggcctcgggataaaacgagagaaatttggagatatcatcgtaaatgatagtcttgcacatcttatagtagcaaaggagattgcagactttgttcaaatgaatctgacgcaagctggtaaggcttctctttctccagtagaaatttcacttgagcatttacatttacctgaagcagtatgggacgagcaggcagggacagtgactagtcttagactagatactgttctcgctgaagtttataatctctcaagaggtaaagtgagtacgatgatcgaacatgatcgctgcaaattaaactggaagattgtaagtcaaccttctgctgaggtgaaagagggagattacttatctctaagaggttccggtagaagtaaaatcgtttcaatcgatgggaaaacaaagcgagataaatggcgaatcacttatcaaattcgtaaatagtttgtcgcaaatagaaggaatatccaaatcgctgtcgaaataggattaagccgggtatatgaaatgagagtaaatcggaggtggcagaattgcctttaacaccattagatattcataacaaagagtttactcgcggtttccgcggttatgatgaagatgaagtcaatgaatttctcgatcaagtaatcaaagattatgaaacggtaatcagagaaaagaaagaattgaatgagagagtgaaactattagaagaacgactaggacatttctctaacctggaagaaacgttaaacaagtcgatcttagttgcacaggaatcagcagaagaagtaagacaaaatgcaaaaaaagaatctcagcttattgttaaagaagcagaaaaaaatgccgatcgcattattaatgattcacttgcaaaagcgcgtaagatttcaatggataacgaagagctaaagaaacaagctgcagtttatcgcactcgttttcgtatgctagttgaggctcagctcgagatgcttaataacgaagactgggatggtcttgtagctcgatttgaagaagaggaagaagagcagcaggaacaaatcgaagaaaaagcgtaatgcacttatttatttttttgtcatttccttgacttcttaattttatttaaactatacttctagtaatagcaataacgatcgacgaagatgggaagagtacctaattcttacttaacaaagcgagccgggaatggtgtgagccggtgttaaccaattagggaagatcgcccctgagtcccgtgctgaacgataagtaagcctcggcgaatcattcacgttacgaatgcaaagtgagcgtaaagcttaatttgggtggtaccacgggaaaaaccttctcgtccctattcggggacgagaaggtttttttgtatttgacgaaagtgatgccggggatttgcgcgctacggttgttggtcgttataagttgaaggaggaaacctcatgagctttaaagaaacgctcttaatgccaaaaacaaaatttccgatgagaggaaatttaccaaataaagagcctgacatgcaaaaagaatgggaaaatattaacctttatgcaaaagtacaggaaagaacgaaagaccgtccattgtttgtgctccacgatggccctccatatgcgaatggtgacattcatatgggccacgctgaaaacaaagtgttgaaagatatcatcgttcgttataaatcaatgaacggtttcaatgcaccttacgttccagggtgggatacacatggacttccaattgagcaggcgttaacaaaaaaaggcgtcgatcgtaaaaagttaacggtagctgaatttagaaagaaatgtgaagagtacgcattaaaacaagtcgaccgccagcgcgaacagtttaagcgtcttggtgttcgaggcgattgggataatccatacatcacacttcataaaggctacgaagctcaacaaatcaaagtgttcggtgaaatggcgaagcgcggttatatctacaaagataagaaaaccgtttactggtctccaacttctgaatcagcattagcagaagctgaaatcgagtatcatgataagcgctccccatccatctatgttgcatttgatgtaaaagacggtaaaggtgtgctggcaggggatgagaagtttattatctggacaacaactccatggacgatcccatctaaccttgcgattgcgttaaatgagaagtttgagtacagtgttgttgatgctgacggcacaaaatacgtcgttgcaacagagcttgttgatcaattaaaagaagagtttgaatggacgaacgtaagtgaagtgaagcgcgttaaaggtagcgagcttgaatacgtaacagctcagcatccgatctatgaccgtgagtctctcgttattcttggtgatcatgtaacacttgacgctggtacaggatgtgttcatacggctcctggacacggggaagatgactacttgatcggacgaaagtataaacttgatatcctctgcccggttgatgaaaaaggtgtctttaccgatgaagctcctggatttgaagggatgttctatgataaagcgaataagccaattacagagaagcttgaagaagctggagcccttgtaaagcttacgttcttcacgcactcttatccacatgattggcgtacgaagaaaccaattatcttccgtgcaacggaacaatggtttgcttctattaaagagtttcgtccagagctacttcaagctgtggcagatgtgaattggttccctacttggggcgagattcgccttcacaatatggtaaaagatcgtgaagattggtgtatctctcgtcaacgtgcatggggcgttccaatcccagtattttatggcgaaaataatgagccaatcattacagatgaaacaatttctcacgtatcagacctattccgtgaacacggatctaacatctggttcgagtgggatgcaatagaccttcttcctgaaggatttacttcagggcacagtccaaacggagaattccggaaagaaatggacattatggacgtttggtttgattcaggttcatctcaccaggctgtactagaagagcgtagcgatctcgttcgtcctgcagatttgtatcttgaaggttctgatcagtatcgtggctggtttaactcatctctttctacagccgtagctgtaactggaaaagcaccttataaagcggttctaagccacggcttcatcctcgatggtgaaggaaagaaaatgagtaaatctcttggaaacacaatggtaccaaatgatgtcatgaagcaattaggcgcagatattcttcgtctatgggtatcatcagctgattaccaggctgacgtgcgggtatcagatgatattttaaaacaagtagctgaagtataccgtaagattcgtaatacgttccgctttatgctcggtaacttggaaggctttgatccagctcagcatcaagtcgcttatgaaaatctaggtgaacttgatcagtatatgcttgtgaagctgaacaacttagtatcaaaagtgaagaaagcttacgatgagtatcaattcttaacggtttataacacgattcataacttctttacgattgaaatgagttcgttctatcttgatattgcaaaagatacgctttacatcgagcatgaagatcatccgaagcgccgtgcgattcaaacagttctttatcagacggctgtagcgttaacgaaacttctttctccaattattccccatactgctgaggaagtatggcagtatgttcctggtgaaaacgaagaattagtacagctatcggatatgccggaagtgaaggattttgaagggacagcagatcttgaacagaaatgggatcatgtgatggaacttcgtgatgaagtgctaaaagcattagaagaagcgcgtaacgagaagaaaattggtaagtcgttaaccgctcagcttcatatttacgctgataatggtacgaaagatttgcttgaaggcgtagcgaatcttgagaagctctttatcgtatctggtgctacagttgccggtacgaaggctgaagcacctgcagaagcaaaagtatatgaagaactagcgatctctgtttcacctgctgaaggagaaacgtgtgagcgctgctggcaagtgaaaacggatgttggcactgatagcgagtacccaactctttgcgctagctgtgctgaaactgttaaaaatcattactaatcgtgatcgtaaacgagaagacgctttgcaattgcagagcgtcttttctatatgacaaccgcagtttcgattgtctgctgaagcaagctgtgctaaactttcataggaagtaacatttgatcggaggagcgctcgtgtggaaatatctcatagccattggcatcattgtacttgatcagtggaccaaatggcttgttgtgaagtatatggaatatggtgaaaacataacgttgatcgatggttttctttctctcacatctcatcgaaaccggggcgcggccttcggaatccttcaaggacagatgattttcttttatattattacgattttcgtcattggagcggttatttattatatgagacagtataagcatagccgtttcgttagtgtaacgctggcgctcatacttggcggcgcaattgggaactttattgatcgagtacttcgaggagaagtggtggattttgtaaacacgttcatcttctcttatgactttccgatatttaacgttgccgatgcatcccttgttgtaggggttatactcatttttatcggaaccatttttgaaagtaagcaggctaaaggggaaaactaatggaaaaattcacatttaaagtagcagaagaagaaaaaggtgagcgaattgataagctcattacttcttatgaaagcgactggtcacgtagccaggttcaaacttggatcaaagaaaaaaacattcaagtaaatggtgaagcagtaaaaggcaattataaagcaacagcaggcgatgaaatcgaagtaaccgttccagagcctgaggagttagaaattgttgcggagaacttaaatcttgagatcgtttatgaagatgcagatgttcttgtcgtgaataagcctcgtggaatggttgttcatcctgcaccgggccacgctagcggcacgcttgtaaatggactaatgtatcaagtgaacgacctaagcggcattaatggcgttgttcgccctgggattgtgcacagaatcgataaagatacatcaggtttgttgatggttgctaaaaacgataaggcgcatgaatcactcgtaaagcaactgcaagccaaaacagttaacagactatatacggccattgtacatggcaatattcagcacgatgtaggcacgattgatgctccaatcggacgagatcggcaagatcgtcaaaaaatgacggtgacggatgagaatagtcgcgacgctgtaacgcattttcgtgtgcttgagcggtatcagcaatatacgtatgtggagtgtaagcttgaaacaggtcggacgcatcaaatccgcgtgcacatgaagtatatcgatcatcctgtcgcaggggacccgaaatacggaccaagaagaaagtcgcttccaattgacggtcaggcgctacatgcaggagtactaggttttcgtcaccccgtaacggaagagtggcttgaattctcagcacctattcctgaagatatcgaacgcttattaaaaagacttagacaagattaaggttgacattagagaagatctctgcgatactctttgtagacaacagcataccctttaaggacagtccagtgaggctgcaaaggaaaatcggctgcgtacgaacgctacatttgtatgcccaagaacccttttgccctcatggcgaaagggtttttaatgcttaggaatagaaagagagaggggcggtcatcatggaaaacaagcgaattttgctagatgatcaagcgattcgaagagcactaacaagaattgcacatgaaatactagaacgcaataaaggcatcgaaaatacaatgcttgttggaataaaaacccgaggcatctatttagctgaaaggttagctgaacgaattgagcaaatcgaaggctcggcgatttcagtaggagaagtggacatcacgatgtatcgcgatgacttaactcacaaaaatgaagatcaggatccgctgattaaaggaacaagcatatcaaaagatgtgagcgatcagaaagtgattctcattgatgacgtcctttataccggtagaaccgttcgtgcagcaatggacgccttaatggatctcggtcgtccatcacaaattcaattagctgtgctggtggatcgcggacatagagaattaccgattcgacctgattacgttggcaagaacgtgccaacatcaaaagaagaaatcattgaagttgcccttacagaagtagatgactttgatcaagttagcttaacacaatcataaatcgtgctccctttaatttcgtccagagagacggccaagggaggaaccgcgttccgttataggacacgcgtgtacctccttgcggccatgcaaggagtttttttataagcatggccgggacacgcacaaccaaggaggaaaacatcatgaaacaagtactaggaattcgagacgttccaaaaccatcaagttggcttacattaagcttacagcatttattcgccatgtttggcgcaacgatattagttccgtttctcgtcggtcttgatccggccgtggctcttgtctcaagtggacttggtacactagcgtatctcttaattacgaaaggtcgaattcctgcttatctcggctcatcattcgccttcatagcaccaatcatatcagcggtatcattgcatggccctgaaggagcgatgatcggaagcttttttgcaggaattgtttacggattagttgcgatcggaattcgagcacttggcttaaactggctcttaaagctgctgccaccgatcgttgtaggaccggtcattatggttattggactcgggcttgcgggaacggcgattgacatggccatgaacaacccggcgacggaagcctatagcggcacgcactttactgtcgcacttgttacgcttggggttaccattcttgcttcgatgtttttaagaggatttttcagcctgatcccaatcttaatcggcattgtatcaggatatacatttgcttactttatgggcattgttgacttaacaccaattaaagaagcttcattctttcaaatgccagactttatcatcccgtttgcggattacaatccagtagacgtcttctcatgggaaatcttgttcattatggttcccatcgctgttgtcacgatcgctgaacacattggcgatcagatggtcttaagtaaagtagccggaaaaaacttcttaaaaacaccaggtcttcaccgttctattcttggtgacggcgtagcgacaatgatttcatcttgtcttggtggaccgccaaacacaacttacggcgaaaacatcggagtgcttgccattacacgcgtgttcagcgtcttcgtcataggaggagccgccgtgctcgcactcatgttcggcttcgtaggaaaagtaacggcgcttatctcaacaattccaacggccgtcatgggcggagtttcaatccttctgtttggaattattgcttcttcaggcctacgcatgctaatcgataacaaaatcgatcttggagaaaagcgaaacttgattatctcctctgttattcttgtcatcggtgtaggtggtgccttcatccaggtaagtgataacttgcaaattgctggcatggctctagctacgattatcggtattgcgctaaacttgatactgcctggaggaagctcacagcaatcagtagaaaaaatgttcgaagaagatcttgaaaacaatgaaccagctgcatagtatcatcctttaaaaaggtacagagagacctaaaagggtggaaatgagaggcgttgacacaacgcgtctacctttctgcaccctgacaaacgctcagggtgttttttttgaaaaaaaatgaaggaaatggagtgaatgatgtgaagcatttacttgatatgacgtctcttacactagatcaaattcaggagatattactacaggctgagcgtttacgaaaaggaaaaagtcttcaaacccaggaacctgtatttattgccaatctctttttggagccttctacaagaacgagatttagttttgaagtagcagaaaagaaattgggatatgaagtgttgaattttgaaacttcctcatccagtgtgcaaaaaggagaaacgctgtacgacacgatcaagacgcttgaagcaattggtgttagcgcagtggtcgtaaggcacaaggatgagaagtatttcgaacctttacttgaaaaaacgacgatgtcgatcattaatgctggagacggatgtggtcatcatccaacacaatctttacttgatcttctaaccattcggcaggagttcaagcgatttgaaggccttcacgttgtgatagctggagatataaagcatagccgagtggcgcgctcaaatgctcacgtattaaaacgattgggggcaaaggtaagcttctccggcccacctgaatggcaagatgaaacaatgaatgaatttccattcgtaacgatagatgaagcagcggaacaggcagacgttctcatgcttctccgtatccaaaatgaacgacacgaaagaaaaagcgacacgggttcttatcttgagtcgtatgggttaacaatcgagcgagagaagagaatgaaaaaacatagcatcatcatgcatcctgcaccggttaatcgaggcgttgaaattgatacaacgttagtggaatgcgagcgctcaagaatttttaaacagatggaaaacggtgtttatgttcgaatggcctgcttgaatttagttctacaacctacacagaaagggatggtcgtgtaatgctaatccaaaacgcaaaactagtaaacgaagctggagaattgatggagcaggatgttcttgtaaatgaggaaggacgaattgaaaaaatcgcaaaagggattgaaaaaggagcacatgaaacgtttgatgcaaaaggaaatcttctcgttcctggtcttgttgatctccacgttcatttaagagaacctggcggcgagcataaagagacaattgaaacgggaacgaaagctgcagcaaaaggtggatttacaactatagcggcgatgccgaatacaagacctgttccagataatatagatacgatggacaaattgatggaacgaattaaggaaacggctagcgtacgggtccttccatacggagcgattacaacgagacagcttggtgaagagcttacgaattttaaaggattacaaactagcggtgcatttgcgttaacggacgatggcgttggtgtacagaacgcaggaatgatgctagaagcgatgaagcgtgcggcagctagtaacctatccattgttgctcactgcgaagaaaatacgttgatcaatggcggaagcgttcatgaagggcatttttctaaagaaaacggattaaacggtatcccgtcagtatgtgaagcggtacatattgcaagagacgtactgctcgctgaagcagcaggcgtacattatcacgtttgtcatattagcacgaaagaatccgtacgcgtcgttcgcgatgcgaaacgggccggggttaacgtcactgcagaggtgacacctcatcatttgcttctatcagaagatgacatccctggacttgatacaaattataaaatgaatcctccgctacgctcgaaggaagatcgagaggccctacttgaaggactgctcgatgggacaatcgattttattgcaacagatcatgccccacattcacaggatgaaaaggcacaatcaatggaaaaagcaccgtttggcatcgttggactggagacagcctttccgcttctttacactcattttgttgaaaaagggacgtttacgctcaagcaacttgtggattggttaacggttaagccagcgcgcgcatttggcttagaatacggcacgcttgcgagtggcgtacaagccgatatgaccattattaatttaacagaggaagaggatattaatccggagttatttgtctcaaaagggaaaaacactccatttactgggtggccgtgcaaaggatggccagtcgcaacatttgtaaatggaaaaattgtgtttgaaaaggggagcgatcaatgatgaaaagacagctaatactagaagatggatccatttttgtaggaaaagcatttgggagtgacatcgaaaaaagcggtgaagttgtttttaacacaggcatgacagggtatcaagaaattttatcagatccttcttactgtgctcaaatcgtcacgcttacgtatccgttaatcggaaactacggcattaaccgagatgatttcgaatcgattaacccatctgtacacggccttatcgttaaagaagcaacggctgcgccaagctattggagaaatgaaatgacgcttgatgaactgcttcgtgtgaaaggcattcccgggctagaaggaattgatacaagaaagctaacaaagcttattcgttcgaatggaacactaaaaggaaagatgtgtagcatggacgtcgatccagaaaaaattgcacgtgatctaagagaaaccccgttaaaacgagatcaggtgaagcaggtttccattaaagcaccatacgcaagtccaggacggggcttccgtattgttcttgtcgattttgggatgaagcacggcattctgagagaattaacaaagcgtaaatgtgatgtggttgtcgttccgtacaatacgtcagcggaagatattcttcgcctaaaccctgatggcgtcatgcttagtaacggtcctggggacccgaaagatgttcccgaggctgtagagatgatcaacggcattcttggtaaaatcccgctctttggcatttgtcttggtcatcagctatttgcccttgcttgcggagcggaatcagagaaaatgaagtttggccatagagggtcgaatcacccggtaatggatttatcaacaaaacgcgtggcgattacttctcaaaatcacggctatacgatcgcacctgaaacgatagagaatacggagttaattgtcacacatgttgcagtaaacgatggttcaattgaaggggttaaacataaggagtatgcagctttcagtgtgcaataccatccagaagcttcacctggacctgaagattccaatgaactttttgacgactttatcgcgatgattacaacattcaagggggaaaaaacatatgcctaaacgtacagatattcaaaaaatccttgtgatcggatcaggaccgattgttatcgggcaagcagcagaatttgactatgcagggacgcaagcgtgtcaggcgttaaaagaagaagggtatgaagtgatcctcgtaaactcgaatccggccacgattatgacagatacaacgattgccgacgaagtttacatcgagccactaacgcttgattttgttagccgaatcattcgaaaagaacgaccagatgctcttcttgcgacgcttggaggacaaactggactaaatatggcaatggaattatcagaagcgggcgttttaaaagactatgaagtagaacttttaggtactaaacttgatgcgattcagcaggcagaggatcgtgatttgtttcgtacgctcatgaatgagctaaacgagccagtaccggaaagtgatattattcataatctcgaagaagcctatcaatttgtgaagcgaattggctaccccgtaatcgttcgccctgcctatacgctcggaggaacaggcggcggaattgtaaacaatgatgaagagctagaagaaattgtttcaagtggacttaaatacagcccggtcacccaatgtcttctcgagaaaagcattgcaggctttaaagaagtggagtatgaagtgatgcgtgatggtcaggatcaggcgatcgtcgtttgtaacatggagaacattgacccagttggcattcacactggtgactccattgttgtggcaccgagtcaaacgctatcagatcgagattatcaaatgctaagaaacgtcgcactaaaagtaatccgtgccttaaagattgaaggaggctgtaacattcagcttgctctagacccatacagtttccaatattacatcattgaggtaaatcctagggttagccgttcctccgctcttgcatcgaaagcaacgggctatccaattgccaaacttgcagcgaaaatagcggttggactttcgcttgcagaaatgaaaaatcctgtcactggaaaaacatatgcaagcttcgaaccagcattagactatgtcgtttcgaaaattccaaggtggccgtttgataagtttgagagtgcaaatcgaaagttaggaacgcaaatgaaggcgacaggcgaagtgatggcgatcggacggacgctagaagaatccctgttaaaagctgtgcgttctttagaatcgaacgtcagtcatatatgcataccagaattagctgaccttgacgacgaaacgatggaaaaacgaattcgcttcgcagatgatgagcgcatctttgttgtagcggaagcatttagaagaggaaagacaatgaaagaaattcatgactggagcatgattgatcattatttcctcgtgaagatacaaggaattattgagcttgaaaacaaactaaaagaaaataaagggaatcttgatcttttacttgaagctaaacaaaaagggttctcagacgatatcgttgcaactctctggaatcaaaaagagcttgaaatttatgagctcagaacaaaagaatccatccgacctgtctataaaatggtcgatacctgtgcaggggaatttgaatctgaaacaccgtattactactcaacttatgaagaagaaaatgagtcgctagagacgccgaaagagagtgtgcttgtacttggttcaggaccaattcgaatcgggcaaggaattgagtttgactacgcaaccgtacacagcgtttgggcaattcgcgaagctggatatgaagcaattattataaataataatccagaaacagtttcaacggatttcagtatttcagataagctatattttgaacccttaacagtggaagatgtgatgcacgtcatcgatcttgagaagcctaaaggcgttatcgtacagttcggcggccagacggctatcaatctagcagatgaactatcagcgcgaggcgtgaacattctaggaacttcgttagaagatatggatcgggctgaaaatcgcgacaagtttgaaatggcgatggcagagctgaatattccgcaaccagaaggaaagaccgcaacgtctgttgatcaagctgtctcgattgccgagcgaattggctatcctgtccttgttcgcccatcttatgtacttggcggaagagcgatggaaattgtctacaaagaaagcgagcttcttcattacatggaaaatgcggttaaagtaaatccgcagcatccagtcttaatcgatcgctatttgatggggaaagaaattgaagttgatgcgatctctgacggagaaaccgtatttattccaggaataatggagcacatcgagcgcgctggaattcactcaggcgattccatcgcggtgtatccacctcagagcttatccagtgaagtgaagcagacgcttattgatcaaacgatcacgcttgcgagaggattgaaaatcaaagggctcctaaatattcaatatgtgattcaaaatgagcaggtatttgtgctcgaagtgaatccaagatcaagtcgaaccgtgccatttttaagtaaaattactggagtacctatggcgaatctagctacgaaagtgatcctcggatcgtcgctcacatcacttggttatgaaacagggtatggaacggaaagagatgacgtgtatgtgaaagtaccggtcttctcctttgcgaagttacgtcgcgttgacattacgctagggccagaaatgaagtcaacaggtgaggtaatgggtcgcgattatacgcttgaaaaagctctttataaaggactcgttgcttcgggtatgaagattcctacgcacggatcggtcttattcacaatcgccgataaagacaaagaagaagcgattgatattgtaaaacggttcaatgcaatcggctaccacattcttgcgacagaaggaacggctcacattattcgagaactcggaattccagtaacagttgtcaataaaatcggagcagagaaaccgaatttattacacgtcattcgtgaagggcaggcacaatttgtcattaatacactcacaagaggaaagcaacctgcacgtgacggcttccgcattcgacgcgagtcagtggaaaacggcgttgtttgcttcacgtcgcttgatacagcaaaagcgttgctacgggtcattgagacgatgacgtttacgagcacaagcatgccgaagtttcatgaaaaagaagtggttcgttcatgaagcagttaaaaaccgagcttgtttctcaaaaagaaattgcagcttcgatttatgaagcagttgtttttcataaggagatcgatgaaagcttccaacctggacaatttgttcatgttaaaacgggattcggatcagatccattgctaagacgcccgatcagtatttgtcatgtcgatcctaacaagcatgagttaacgatgatttatcgtgcagaaggaaaaggaactaaagtattagccgagatggtaccaggggtcgaagttgacctccttggaccactcgggaatggttttccagtggagaggacaaaggagggcgaaacagctctacttgtggggggcggtatcggcgttccacccctctattacctttcacaggaattaacgaagcgcggggtaaaagtaaaacatgtaaacggttttcaaacaagttctgtcgttttctacgaagaaaaatttaaagcatacggccctgtcacaatcacaacggcagatggaacatatggcgaagaaggatttgtaacaaaccagcttgacatgaacgctgactaccttttcgcctgtggaccatcaccaatgttaaaagcactagaaaattaccgtgctaaaaaaggtgtttacctatcacttgaacagcgaatgggctgtggcattggtgcctgtctcgcatgtgtttgtcacgtacagggagacgaaacaggcttcgcttatcgtaaagtgtgcagtgatgggccagtatttcaagcgggggaggttgttctatgagtcgattacgagttgagttacccggcctagacctaaaaaatccgatcatgccagcatcaggctgctttggatttggtaaggagtatagcaagttttataatctggatcagcttggagcgataatggtgaaagcgacaacgcatgagccgcgctttggcaacccaacccctcgcgtcgcagaaacaacatcagggatgttaaatgcgattggtcttcaaaacccaggacttgagcgtgttatgacagaggagttaccgtggttatcgagatacaacgtgccaattattgcgaatgttgctggatcgacgatagaagactacgtaactgttgcagagcgaatctcaacggccgataacgtacatgcgcttgagttaaatatttcttgcccaaatgtgaaagaaggtggtctcgcatttgggacggttcctgaaacagcatttgacgtcactaaagcagttaaagacgtgtcgtcggttcctgtttacgtcaagctctcgccaaacgtaacagatattgtgcagatggcaaaagtcgttgagcgtgccggtgctgatgggttaacgatgattaatacacttctcggtatgcgaattgacttaaaatcaggtaagccgattcttgcaaatggagcgggaggattatcaggtccggcgattaaacctgttgccattcgcatgattcatcaagtaagtcagcaggtaaatattccaattatcggaatgggcggggtgcaatccgctgaagatgtaatcgaatattatctcgcaggagcgagcgctgttgcggttggcacggcaaacttcgtggatccattcgcttgtcctaccattattgatgccttaccagctttgctggatgaattaggtgttcatcatatttctgagctgacaggaaggagctggaaaaaggaatgggatcttcaatcatcctcgcactagatttttcggaaaaggaagagctaaatgctttccttaagcaatttgaaggagagaagctttttgtaaaagtgggtatggaagcattttatcaatacggaccaaagcttgtagacgaattaaaacagcgaggtcatcacgttttcctcgatttaaaactgcatgatataccaaatacagtaaataaagcgatgaaggggcttgctggtctaggtgttgacttaattaacgtacatgcaagcggaggatcacggatgatgcaggcggcgttggaagggctagaagcaggtactcgcggcggccaaaaacggcctttgtgcatcggcgtaacgcaattgacgagtacatcagaagaaatgcttcgaagcgaactgcatattgcaacagatatgaaaaatagtgttgtgtctctcgcagagcttgcgaaggaaagcggacttgatggtgtcgtcagttcagctcttgaggttccgatgatcaaagaagcgtgcggagaattgttcttaacggtaacaccagggattagattagaaggcgatctggctggagatcaaaaccgcgtctgctctccgaagaaagcacgatctctaggaagtgattttattgtggtcggacgcagtatcacaggagcgaaaaacccattatcagcatacgacattttaaaatcagagtggaggaagtcacatgaaatcaatcgctaaagcactattggaaattaaagccgtaagcctacagcctaataacccttttacgtggtcatcaggtttattatcaccgatttactgtgataatcgtttaaccctttcttatccaaaggtaagaaaggaaattgcgagtgggcttgtcgatatggtgaaagaaaaatacgctgatgcagaagtgattgccgggacagcaaccgctggtattcctcacgctgcctgggtgagcgacctcctcgatcttccgatggtatacgttcgcggaagtgcaaaaggtcatggaaaaggaaatgtgattgaaggaaaagtagaggtaggacaaaaggttgttgtaattgaagatttggtttcaacgggaggcagtgcgatcgaggctgtgaaacaattagaagctgctggcgctaacgtgctcggtgtagccgccatttttacatatggaatgaaaaaaggtgcagaacagttcgccagcgcggaaattgcctgggatacgctcaccaatttcgatgaattattaacatgtgccgtagaaacaggtatgattgaagaaagagaggttcaatcactgcttcactggcgcgacaatccatcctcaaaagaatggttggagcagttgaaagatctctccgtttaggagggctaagatgagaaaaatgcagggagaagagttcgattcactcgtatccttttttgatgatatggcacgaacaaagtggcttggtgccgttcatgatgaattaaaacaagcttcaggttcatgggaagaaaaatccgtactcgatgtagggtgtggaacagggagacttcttcttcgtggtgttgaggaagcgagcatgctgacaggtgttgatctatcatctgaaatggttaaagcaagcaaacaaaacttcttctttttaaatcgatcaaataaaagtcatttttctgaaggagacgcatgcaaccttacgtttgaggatgacacgtttgatttgtctctatcaacgtgcgtcatgtttcttttacctgagcctgaagcaggcatgaaagagatgattcgcgtaacaaaagaaggcgggaaggttgtgatgttaaatccgtctttacaaatggaccaaatggcagctttctcatatgcaaaaaagcataacatgagcggttttgaacaaacttctttgctaaaatggtcgaatgtttcaacgaaaaggcaccgctactcaccagatcagttaagtgaaaagctaaaaggtctaggtgcgaaggaaacaaaacatgttgaagtactagatggtttagccattattacagttgcatcgttataaaaaaggttcccgctaaatttagcgggaacctttttcgttacttcttcatcctaaaaacaagatcttgatcaggtgtaacatataacgtattttgctgatcatatgtcacaaatccgggttttgcaccatttggttttttaacgtgacgcacttccgtgtaatcaactggaacagaaccagactcacgtgctttactgaagtaggcagcgagattagctgcttcaagtagcgtttcctctgtatattccttacttcgaatcacaacgtgtgatccaggaatatctttcgtatgaagccacgtttcgcttcgggcggccaacttatttgttaaatactcattttgtttattattcttcccaacaagaatttcggtaccgtcagaagaaagataaacatcaagctgaggttttgttggctttgattttttctttttgcgtcgcttcttaatgtaaccttcttcttcaagctcttcccgaatttcctcgatatctcgaggtgaagcagaagttagctgctgaatgagctgttcaaggtaagcaatttcttgatgagccatcgtaatctgctcttcaagaacggaaatggaattttttgctttgctgtatcgcttgaaataagcttgagcgttctcagacggcgttttttgtggattcagttcgatatgaactgttccaccatcttcatcataatagttttgaacttctacttgtttatcgcctcgttttactacatgcatatttgctgttaacagctcgccaagcagttgataagtgtcagcttcctgggcttgttcgatcgtacgtgatagcttcttaatttttttctcgtttttctttaattcatttgatagaaaacgttcgagatcatttgactgctgtttaacacgatcacgatcggctttcccataatagaaacggtcgagcagttcactagcggagtcaaatgctcttttttccccagctaagtgggtaagctcaacaactgaaaagaactcttttgaacttgtcaccatttgcggcgcgtagtcgtggtgctctagtttttgaaaaacagcgaagaaagcttcaggtagcgttgagcgatttgcaaggccagctctatgaatcacttcatttgcgatgagaggtgaaagtccaccaaaagcttgcacgagctgctggctcaatttcccggcgttaaaatcgatttgccttagaaaatcatctcttgttaaaccaaatggcgaaactttgttttgcgcagggggagcgatataatcctgccccggaagtaccgttcgatgtctgtttacagacggagaaaggtgcttaatgctatctaaaatcatgttcgattcatttaatagaatcacgttactatggcgccccataatttcagcaactaatgttctagtcgttaaatcgccaagatcatttcgtgctttaaacgtaatgtggatgattcgttcattttcaatttgtttaatttcttccacaatactaccttctaagtgcttacgaagcagcatgcagaacattggtggttcttttggattcgcataagattcctgcgtaatttgaattcttgcataagatggattagctgataaaagcagctgatggtttttcccaccagaacgaatcacaagtaataaatcagtcgcatagggctgatagatttttgtgacgcgcccaccttttagttgttcattcgtttcatgtgcaacggctctcattaccataccgtcaaaagacatatcgttcacctacattcctatcactagacattattcttagtatagcatttttttgagcttgtctgaatatagttgaattattagcgacattacgtgcaggatcggggtgtagatcatgaactggtataacatgacaaagggagaagttgttgaggaattggagacaagcgaggggggaattagttccgatgaagtagagagaagaagaaaagtttttggactaaatcaattagatgaagcagaacgaccatcgatgatcttgatgtttttagcccaattcaaagactttatggtcgtcgtcctcctggcggctacgcttatatcgggattacttggagagtatcttgatgcgatcgccattatcctaatcatcctaatgaacgggatccttggctttgtacaagaacgaaaagcagaaaaatccctccaggcattaaaacagttatcatcgccaaagatgaaggtgcttcgtgatggtgattggacgaccatacctgcattagaagcggttgtaggggatattgttcgaattgaaagcggagaccggattggggctgatttacgcctatttacttgtcaggggttacaaattgaagaatcagcgcttaccggggaatcactacctgtaaacaagcatccagaggcgatacgagatgaacaacctggccctggtgatcagcaaaacatgggttttatgggaacacttgtaacgaaaggaaaaggcgttggagtcgtgacagcaactgggatgaaaacagagatgggaaaaatcgctcacctcattcaatccgctgatacgatggaaacgcctcttcaaaatcgattagagcagttaggtaaagtgctaatagctgcagcccttcttttaacggcactagttgtcgtgctagggattattcagggacgcgatgtctatagcatgtttttagctggtgtatccctcgctgtcgcagccatccctgaaggcttgcctgcaatcgttacaattgcccttgcgatcggcatgcaaaaaatgagtaaacgaaaagccattgttcgaaaacttccatctgtagaaacattaggatgtgcgaccgttatttgttcagataagaccggtacacttacacaaaacaaaatgatggttacaaagctgtgggcaggcggagagacgtgggatgttaccgggtctggctactctccttatggcgacttctttaaaggcaatacacgcgtttattctgatgaggaacgctcgctgaagcagctccttacttttggattactatgtagcaatgcgagagtgatggaaaaaagcggcgaatacgttcttgacggtgatccaacggaaggggcactcgttgccgcagcaatgaaggccggattaacggaagatgtgagggaagaagaatttacaatcatccaggaattcccttttgactccaaccgaaaaatgatgagcatagtagttgaagattcagttggaaaacggtacgtgatcgcaaaaggtgcacctgatattgttcttaagcagtgtgaatcggtgttatggagtgagaaaaaagcgccgcttcgcaaaagctatgaaagagaaattcaggagcagttaaatgcatttggtgaattagctctaagaacgatcgccgtagcttttaaaccgatccaaaatgaagacaatatgcttcatagcgtacaagctgaatctcgcttaacctttgttggcttagagggaatgatcgatccgccacgtgaagaagtgaagcaggctgtagctgattgtaaaaccgccgggatcaagacgattatgattactggtgatcatgtgacaacagctaaagcgattgcccataatttagggattctacctgagcgtggcaaagttatggaaggaagtaagctctcttccttgagcgtagaagaacttgaaaatcaagtagaagacatatacgtgtttgcgcgtgtatcgccagaacacaaattaaaaattgttaaagctcttcaaaatagaggtcacatcgtcgcgatgacaggagatggggtgaatgatgcccctgcgattaaagcttccaatatcggtatttcaatgggagtgactgggacagacgtagcaaaagaatcatcatcgctcatattaagcgacgacaattttacaacgatcagagcggcggtagaagaagggcgaaacatctatgaaaatattcgaaaattcattcgctatatgctggcctcaaacgttggcgaaattcttgtcatgctttttgcgatattactgatgctgccccttccgctcgtaccgattcaaattctttgggtcaatctcgtgacggatgggctgccagcaatggcgcttgggcttgaccctgcagagggtaatgtgatgaggcgagatccgcgcaagccaaaagaaggtgtttttgctagaggattaggatggaaaatcatctctcgcggtatcatgataggagcctgtacacttgctgcctttatgatttgctatagtgaaaatccgaatgatcttgttcaggcacaaactgttgctttctctacactcgtgctcgctcaattgattcatgtgtttgactgtcgaagtgaacgatcgatctttcatcgtaacccttttgagaataaggctcttgtccttgcggtactatcttcggttgggttactgctcgcagtcatctattatgaacctcttcaaccgattttccatacaacttatttatcgatgagagaatggatgcttatattagtcttctctagcattccaacgttcctattagcaggtacaaccttttttaaaagacaacgccgcagagggtaattaccctctgttttttctattccagattaatagtaagaaagagatatccctttgtttcagtttgatgaagtggtacaattggatagaatagctattggatgtgataatatggttaagagtatgaccggatttgggagagcatcgcatgagggtgaggatgttcaaataacggtagaaataaaatccgttaaccatcgttacttcgatggtacatttcgcatgccaaaagcgctccttcatctcgaaggtagaatgaagaaggctattcagcgcacgattgtgcgcgggaaagtggaactttatttaaccattgatggagctggttttcgatcatcggacgtaaaggtggattggaatctgctcgaccaatacataacgattttaaaacaagcctccgaacgttacggattgcaagaagatttgtctgcctctaagcttttaaacatggatgtctatcaagtgacagagaaagaacaaaatatcaatcagctagaggatgagatttttgccacaatgaatttagcggtcgctcgacttgttgaaatgcgagaaattgaaggggaggcccttgagcaagatataaggacaaagcttcaagaaatgacagaagtcttaacttccatttcaatgctttcaaatgaagtaacatcctcatttgaagctcgcatacgcacgaaactcgaaggctttaaagaacttgaagcaatcgatgaggctcgtattctaacggaagtggcgtaccttgctgataaagcgagtatcgatgaagaaatcacacggctccgtagtcacctagcccaattccatgatattcttagtaaagatggtgtcgtaggaaggaaacttgatttcttagtgcaggaaatgaatagggagctgaatacgatcggttccaagtctcaacaccataagatcagccaacacgtagttgatcttaagagcgaagtggaaaaggttcgtgaacaggttcaaaatattgaatagcctgagcgctttgtttaaaatcaccctactggtgtaaaaatagaatcgtgattcctgggaggaacgaccatgagtattaaattaatcaatatcggattcggtaacattgtgaatgcgaaccgaattgtttcaattgttagtccagagtcggcaccaatcaaacgaattatcactgttgcaagggaccgcaatatgcttgttgacgcaacatatggaagaagaacgcgtgccgttattatttctgatagcgaccatgtcattctttcggcagtccagcctgaaacagtcgcgcagcgtctcgtgaataaagacgagctttcagacgagtagcatctataaagtggaggttagtatggaaaaagaacgtgggttgttaattgttctctctggcccttctggtgttggaaaaggaacagtaagaaaagctttcatgcataatgcggacgaggtacagtattccatttctgttacaacgcgcaaaccgcgtgaaggcgaagtgaacggggttgattatttctttaaatctcatgaagaatttgaggatatgatcgaaaataataagctgcttgaatatgcccattacgttgggaactactatggcacgcctgttgactatgtagaagaaaccttgcagtctgggaaagatgtgttgcttgagattgaagtgcaaggagcaaagcaagttcgcaaacattttcctgaaggagcttttattttcttaatgcctcctagcttaacagagcttcgcaatcgcatcgttaaccggggtacagaatcaaatgatttaattgataaccgtatgggcgttgcgaaagaagaaatcgaattgattgatgaatacgattatatcgttgaaaatgatcaagtagaattagcttgtgagcgaattcgtgctattattacagcagagcacttaagacgtgatcgtcttgcccataaatataagaatgtaacggaggtttaataatgattttatacccatcgattgactcactaatggaccgtattgattcaaagtacacacttgcaacgctttctgcaaaacgtgcacgcacgattcaacaaacaggaaatgtttacgtggatcgtccacagtcagtaaaggctgttggtaaagcacttgaagaagtacttgatggcaaactacttgcagacggtatgatagaagactgagtgaaaagtaacaacctatgagaataggttgttatttttttcttgaattagctgcgatttactatatttatattatgttaactatttggacggaaggtgaaacttatgagtctaaagggaaagaagatattgctttgtgtcagtggtgggattgctgtatttaaggcagccgctctcacaagtaagctctatcaaaccggtgcggaagtgaaggtgttaatgacaaaatctgctactgaatttgttacaccattaacgtttcaaacgctttccagaaatgatatttataaggatacctttgaagaaaaggacccaacatcagtggcccatattgacgtagcggactgggcagacctcgttcttatcgcgcctgctacagcaaacataattggtaagcttgcgaatgggatctcagacgatatgatgtcaacgacgttacttgctaccgaagctcctgtatgggtagcgccagcaatgaatgttcacatgtacgatcatcccgctgttaagaaaaacatggacgtacttcgctcatttggctgtcattttcttgaacctggagaagggttacttgcatgtggctatgttggtaagggacgcatggcggagcctgaagatatcctggcaacgttagaaacgtattttaaagaagatacgaacgatttggctgggaaaaaagtagtcgtcacggcaggtcctacgcgagaaccagttgatcctgttcgctattttacaaattactcttctggaaaaatgggttttgcattagcggaacaggctgcgaaacggggggctgaggttacattagtggcaggtccagtaacactcccaacacctcaaggggtgaagcgaattgatgttataacagcgcaggaaatgttcgagtctgttctacaagcagctgagacggctgatattgttataaaagcagctgccgttgctgactatcgacctgctgagattgcttcagaaaaagtgaagaaatctgaaggtgagatagtgattgagatggagcggacgaaagatatactatggacgcttggacaaaaaaagaaaaatcaaattcttgttgggtttgcggcagagtcagagcggttggatgaatatgcacagaaaaagctagtaaagaaaaacttggatttgatttgtgcaaacaatattaaagcagagggtgcaggctttgataaagataccaatgttatgacgcttcttcaccgtgatggagaacgcgttgaacttcccctgcaatccaagcatgaggcagcgaatcgcattctcgatgaagtgaatcgattggacgtgactcgttcatgattgcaaaagtcatagtcgatgtaccggcgaatcaaactgatcgcctgtttgattatgcgattccggaagaatgggcagaaatgatagaacctgggatgagggttgtggttccctttggaccgagaaaaattcagggatttgtgatctcggtcgcgaatgaatccgagcatgctaaattaaaagaattaagtgaagtaaaagatgttactcccatattaacgcaggagctacttgatcttgggttctggcttacggaaaaggcgctttgcttcgcagtatcagcccttcaggctatgttaccggctgcaatgaaagcaaatgtgacgaaaacagttgtgcttggaaatcgtgttaatgaagaagctacatggcatcggatggtatcctccaacggagtgaaatgggacgaatttctttcgcattttagtcataaagaattaaatcgggccatcaaaaacgatgagcttgaggtgcggtatgatgtaaaagaaaaaaccgctcctaaaaccattctctctgtgtcagcggcacttcagaagaacgagcttcaacatgaaaaggaaaagatgggaaatcgcgcattgaagcaacaggaaatcattgcgcacttcatcgagaatgaaggcgctgtttcttataaagagctcatggctatgcttgatacaacgcggtcaacgatcaaatcactcgtctcaaaaggaattttaaaggaagaagaagttgagctttaccgtgacccctataagggacgagaatttactccttccacggctcttgagctcactgacctgcaagaacaagcgataacacccattttgacaagtattgaagatcatcaacatgagacgtttcttattcatggcgtaacggggagcggtaagacagaaatttatttgcagtcgattcaccgcgtgctagagcagggaaaagaagccattgtgcttgttcccgaaatctcattaacaccacaaatggtgaccaggtttaaaagtcgattcggttccgaggtagcggtcttacatagtgggctttcccgtggagaaaagtatgatgagtggcgaaaaattcatcggaaagaagtaaaagttgttgttggcgcacgttcagcggtttttgctccatttacgaatcttggcattattattattgatgaagagcatgagagtagctacaaacaagaagagaatccaagatatcatgcaagagatgtagcgattaagcgtggcgagcattacaactgtccggttgtattaggaagtgcaacgccatcgcttgaatcgtatgctcgggcatcaaaaggtgtttatacccttcttgagctgttgcaaagagtaaataagcaggcaatgccaactgtatcgattgttgatatgagagaagagttacgagccgggaaccggtcgatgttctcaaacgacctttatgacaaattaaaagatcgactagagaaaaaagagcaaacggtgctctttttaaatcgtcgaggttattcaactttcgtgatgtgtcgagactgcgggtatgtagcagagtgtcctcattgtgacattagcttaacgtatcacaaaatcaacgggacgatgcggtgtcactattgtggccatgaagagcgttttccaactcaatgtcctgaatgtgaaagtgagcacattcgcttttttggaacaggtacacagcgtgttgaggaagaactaacaaaaatccttccagaggcacgggtggtgcggatggatgttgatacaacgagacgtaagggagcacatgagaagctcttgaatcaattcggagaaggaaaagctgatatcttactcggaacacaaatgattgccaaaggtcttgattttccaaatgttacccttgttggggtattagcaggagatgcgatgctccatatccctgacttccgagcttcagagaaaacgttccagctgctaacgcaagtaagtggacgcgcaggacgtcatttgctaccaggtgaagtgattgttcaatcctatacaccagaacattacagcattgaaatggctgccgaacacgactatcagtctttttatcagcgtgaaatggtcacgcgaaaacaatttggctatccgcctttttattttcttgccatggtgaatgtttcgcatgaagagttaaccaaaacggttgatgtgacagagaaaattgcagcttatttaaaggatcacttatcaaaacaaagtgttgtgttaggtcctgtagcctcaccgatcccacggatcaaagatagatatcgctatcaatgcatgataaaatacaaaactgaaccgaacttaactcattatttaaaagaaattcaaaagcatttttcaaaggaaataagtcgtggtggattacagctatccattgatacacagccttatatgatgatgtagaatgtgaaagggagtatacgcgtggctattagagaaattgtaatgcatccaaatgaggtgcttgaagttgaatgccatcctgtagaggaattcgataaagaattgcatcagctactcgatgatatgtttgagacaatgtacgcagcagagggagttgggcttgctgcaccacaaatcggtattcgaaaacaagttgccgttgttgatacgagagaagaagaggcattagaactaatcaatccaacgattataaagtcatccggaaaagaagtcgaccttgaaggttgcttaagttttcctggtctatttggcgaagttgagcgcccttataccatcacgttaaaagccctgaaccgttttggcaaaccgtttaaattaaaagcggaagggttctttgcgagagcgattcagcatgagattgatcaccttcacggcgtattgtttacagagaaagtcatacgctacattgaccctgagcaggaaggagacggtgaataacaatgacaaaaatcgtatttatggggacgccggatttctctgttcctgttcttgatatgctagtagaagaagggtatacgatcgtcggtgttgtcacccaaccagatcgtccaaaagggaggaaaagagtgctaacaccccctcctgttaaggtagctgctgagaagcatggtcttcctgtgctacaacctgagaaagtgaaagatccggctcagcttcagccgattctagatttaaatccagatttgattgtaacggctgcctttggccaaatcttaccaaatcagcttcttgaagcaccaaagcacggttgtattaatgtccatgcgtcactgttaccggaacttcgcggcggtgcaccgattcattattcgatcttgcaaggaaagaaagaaacgggcattacgattatgtatatggtggagaaattagatgcaggtgatattttaacacagtccatcgttccaattgaagaacgcgaccatactggaagccttcatgataaactaagtgcgtcagggtcagagcttttaaaagaaacgttgccaaagcttcttaacggtgatttaacgcctgtgaagcaaaaggatgatgaggcgacgtttgcccctaatataaaacgggagcaagagcgaatcgactggacaaaaactggtgaagaaatttataaccacattcgcggtttacatccatggccagttgcgttcacacaatatgaaggcaaagtaatgaaagtctggtggggagaaaagatcgaaagtgctgagaaggctgagccagggtctgtcctttatacagatgcggatggacctgttgtagcaacagggaacacgaccgcgattaagttaacggaaatccaaccagcaggcaaaaagcgcatgacatctgcgcagtatttacaaggtagaacattcgagaaaaatgagagatttggtgaatagtatggcaaatgtaagagaagcagcactagatgtaattgaaaaaatcaataaaaaccaggcatatagcaacctgttgttaaatgaaacaattaaaaaacaccagttaagtcgcaaagatacgggtttattaaccgaaatcgtatacggaacgatccagagaaagaatactcttgacttctacctcgatgattttctaacaaatcggaaaagaattcagacatgggtgatttctcttttacaactttcgctttatcaaatggtttatcttgaccgggtaccagatcgtgccattattcatgaagcggttgaaatagctaaaaaacgaggacataaaggcataagtggtatggttaacggtgtgcttcggaatactcaacgaaaaggacttaagaaccctgaagcgatagaagatgttgctgaacgcatttcgatcgcaaaaagtcacccactctggctcgtgcaacgttggatcgatcaacttggtgttgaagcgacggaagcaatgtgtgaagagaacctgcttgccccttatgtaacggctcgtgtgaatgtgacacgaacatcggttaatcaagtgatcgacgatcttgcaaaggtaggcgtagaggcggtcccaggaagtttatcagaagatgctattaaagtaattcaagggaaggtccttgatacagaggtttataagcgcggtgacttaacgattcaagacgaaagttcgatgctagtagccagagcacttggcgttgaacctggtcagaaagttcttgatgcgtgcgcagcaccaggtgggaaatcaactcacatcgcagagcgactaaatggatctggacacgtaaattctcttgatcttcatgctcataaagtgaaattaatcaagaagcaggcacagcgtttgaacttacgtgcgattgaagcagagacgcttgatagccgaaacgtaggagaacgatttaaagccaaatcattcgatcgcattctcattgacgcaccgtgtactggttttggtgtgttaagaagaaagcctgatattaaatggtcgaaaaaagaggaagatatcgagcgcattacggttgtgcaaaaaggaattctcgaagctcaggcggctcttttaaaaccaggtggaaaattggtttacagtacgtgtacaatagaaggagcagaaaaccaggaagtggtaaaacaattcttggaagaacatcctgaatttacattagacaaaacactctctaaccgtttgcctaaggaagtagcggagtattgtgaagaaggacaacttcagcttctcccccattattttggcacggatggattttatatcgcatgtttagttaaaaaataatgctggatgctggtgaatcgtctgtttacaggcgattcttcccgcattcttgtgataagaggagacggggtaatcacatgcaagcaatcgcattgacagatcaaggccaagtaagggcatacaatgaagatagcacatcatttctccgcaatcacctagacgagtatttagttattgtagcagatggaatgggtggtcatcaggcaggtgacgtggcaagtgcactcgcagttgaatcattggagaaaagttggaaagatgaaaaagcaggatttcgcccgggaagagcggaagcatggcttttacatacgattcggaaagcaaatgaaacgatccttgccttttcaaaagaaaaacctgaatatgccgggatggggacgacgcttgtcgccgcagtttgtacaaatgaatttattacgattggccacgttggagacagccgggcttatttatttggagatcgtgttcttaatcaaaaaacaagtgaccattctcttgtaaatgaactcgtgaagagcggtcagctttcagaagaagaagcggaagatcatccacggaaaaacgttctcttgcgtgcacttggaacggatgatgatgtgaaagtagacgttcacacgtttgagtgggatgaacatgaagcagcgcttttttgctctgatgggttaacgaataaggtatcagacagtgacttggaaaaagtgatgaactctgaaggttctcttaaagagaaggcaacagagcttattcgattagcgaacgaagcaggtggagaggataacattacagtcgcaataattgagaactcttcagcttctggaagtgaatcctcatgctaggtaagcatattaatggacgttacaaactgcttgaaatcattggagacggcgggatggctatcgtctatcgagctttagatttaattctggatcggacagttgctgtaaagctgcttcgtccagaattctcacaagatgatgattttatcaagcgatttcgtcgggaagctgaatctgcgacgagcttagcgcatccgaacgtagtgtcaatctatgacgttggggaagaagaagatttttactacatcgttatggaatacgtggctggaaccacgctcaagcaaaagattcgtgatcgtggcgctctgccaattgaagaagcgctagatattatgaaacaaatgacgtctgctattgagcatgcccatgagaatcacatcattcatcgggacattaagccacataatattcttattgatgagtatggagatgcaaaagtaacggattttggaatcgcgatggcgatgacctccgcaacgattacgcataccaattcggtactcggctctgttcattatttttcgcctgaacaggcccgtggtgcactggcgaatgaacggtcagatatttattctcttggtgtcgtgctatacgaaatggtaacaggagtgcttccattttcaggggattctccggtatctgtcgcgttaaagcacctacaagatcgttttcctaagcctagtttaatcaatacctctctaccaagaaatgtcgagcatattattatgaaggcgatggccaaggaacctgtccaacgttatcaaagtgcgcaagaaatgtatgaagcgctcgatatggctctcgacccgacaaaagtttatgaaaaaccaccagagcaggatgatgaagaagcgacaaaagtcttaacacctgtaacgcctgatagtcgagatgtaggacagaatacgatgccgcaacaacctgttcaaaatgatgaatctagtgagcctcctccaaaaaagaaaaagaaagcaggaaagatcgcaattattgtgatgctgatactcttacttcttgggtgcgcaggtgcgctagcatttacatttatgcctgatctcttctatgtgagtgacgtggaagttccggatgttacgggaatggaatacgaggaagcaagatccgcattaattgaacaaaatcttgatgtaacgaaagaagagcagtttagtgaagaagtagaggaagatgaggtcataagtcaggatcctacttctgggacaatggtgaaagaagatagtaccgtcacactttatgttagtataggggctgaaaaaacagagctcggtgattatatagggaaacagaaagatgaagtggaagctttattaaaagaacagggattcaaaaatatcaaattcgaagacgaataccgtgacgatgctcctgaaggtgaaatctttgatcaaagtcctgaagctgggaaaatggtcctaccaacagaagacgcgatcgtgatttggtatagcttaggttcagaatcatttcctcttgaagatttaaaagataaaacgaaagccgaagtggaagaatatgcggataataaagagttaaagctcgcatatgatgagccagaatttagcgactctgtcgaagaaggatctgttgtttcgcattctccaagtacagctgctcaagtgaaaaaaggtgatgagattacaattaccttatccaaaggtcctgagcccgaacctgagcctgaaccagaaccagaacctgaaccagaaccagaacctgaagcagaaccagaaccagaaccagaaccagaaccacagcctgaaccttcacctgaagatgaggcgattgttgttcctaactcctttaagatcgatgtgaaaaagggtgaagaacatttaattgaaatcctttataccgattcgacaacagaaggcgaagaaatctcggaaaccattacagagacgaaagaaattaactttgatttaacgatctatcctggtgaggaagcatcgtataaaacgtatgtagatggaaaagagaagaaagaaaactcgaaaaccatcacgtacgaagaagcaaaacaaaaatacggaaaaaatgagtaaggagtcctacatggcagatggaagaataattaaagcattaagcggcttttattacgtgcaggatgaagttaataaagaaatttaccaatgtagaggaagagggaacttcagaaagcggaagatcacccctcttgttggtgactttgttgtatatgaagcagaaaataaaacggatggttacgttcttgaaattaaagaaagagaaaatgaattggtgcgtccccctattgcaaacgttgatcaagcttttcttgttttttcagcaacgcaaccaacgtttaatacacagcttcttgacaaatttcttgttcatattgaagcgagtgatattcgaccaattatctgcatctcaaagattgatcttgtttcaaatgtggaagaaagtgaaatactggcgtatgcaggtgattaccgtgatgtggggtacgatgtgattgtttcctctgcgcagagtctgtcaggcgtttcggaaattgaaccgtatttccaagaaaaggtgacggtgtttgcagggcaatccggggtaggaaagtcatcactattgaacgccattaaccccgacctagaattggatacgagtgatatttcaacgcatcttggcagaggtaagcatacgacaagacatgttgagctgatccctttcggatcgggtttagtcgctgacacgcctggctttagctcacttgattttagggggattgaagcggatgatctatggctatatttccctgaaattcaagcgaaaagtagcgattgcaaattccgcgcatgtacccatcaatctgaaccaggctgcgcggttaaagtagcggtagaaaaagaagaaattaaaacgtatcgttacgatcattattcttcttttttccaggaaataaaggatcaaaaacggaggtactaacatgataaaaattgccccttctattctagcttcagattttgccagattaggtgaggaagtaaaagacgtcgaagcagcaggagctgactacattcacgttgatgtgatggacggacactttgtccctaatattacaatcggtgcaccgattgtacgcgcgctacgcccagtaacttcactaccgttggatgttcatcttatgattgaaaatcccgatcagtacattgaagaatttgcggatgctggcgccgatattcttacggtccacgctgaagcttgtccgcatcttcaccgcacaatccaactaattaaaagcaaaggtgttaaagcaggtgttgtcattaatccagccacacctgttgatgcgattaaacacgttatcgaggatgtcgatttagtcttactaatgacggtgaatcctggcttcggaggacaagcgtttattaaccgcgtgctttctaagattacagagacgaaacagcttgccgattcattaggcgtggcacctgaaattgaagtggatggtggagtgaacgcggagacggctcgtgcatgtattgaagcaggagctactgtgctcgttgcgggctcagcaatttatagtcaatctgatcggaaagcggccattgatcagatacgtcaatcataaaacagcggggctcttcccgctgttttttcataagacactaagtttaggtaatggaggaattaggattcatgaagaaagataatcggcttcttttgcttgtagagatcgctttaatggctgctgttggggtgatactagatttattgtcaatcaggttatggccaaatggtggttccgtgtcgctagccatggtgcccatttttttaatcgcttaccgaagagggctaggtgcaggtttaactactggattattagttgggattttgcaacctcttatcgtcccgcccttttatgttcatcccattcaatttttactagattatcccatcgcctttatgattgttggtatggctgggatttttagtgtgacagtggacgcaccaaaacgtaagcgcatgacgatgatcgttcttgggtgcttaactggatcacttcttcggttggtcagtcattttatttctggagtgatctggttcggtgatatggcaccagaaggaacacctgtggcattatattcattcctttataacgcgtcttatttactgccaactgctgctgtctcgatcatcgtacttgccttgctctcaaatcaagcacctaagttggtgcataaacaatgagttcaaagcacatttatattgtggcaggaggaccggaagaggaccttccagctcatcttcttaaagaaaaagatgttaggtggattggtgtggatcgtggcgtctacacgctattaaaaaatggtgttattcctgaacatggatttggggattttgactcagtaagcgcaaaagaacgggaatggatggaaacgcatgatttgccttttaccgtttatccatcagaaaaagatcacacagatctagaaattgcactcgattgggcaatcgatgaaaaccccgatgcgattacgatgtttggagtaacagggggaagacttgatcatagctggatgaacgtccaaatgttgataaagggtgtgaaagctaacgtaccactttccattgaggataaattaaaccgattagaaatgaaagagcctggtacttactcagctcaaaaggatgatcgttttccgtatatgtcttttctttcttttactcctgaagtaactggtttaacgcttgttggctaccgttatccactgatagaaaggcatatatcctggggatcaagtctttgtattagcaatgaactggtcgaggaaaatgggtcttattcatttagtagtggcatactattggtggtaagaagttcggacgccgagcaggtttaggtactatttcaatttcggcgaatataatagtaatgcatcttatattctcatattgttcatcctggggtccatctttgactttctgaggagggggaaatatgaagttttatacgattaaattaccaaaatttctcggtggttttgtgagagctgtgctcgggtcttttaaaaaaaatgagtagttgaattaaaaaaagcacccaattgggtgcttttttacgtttactatgcgcgttcgattttgcctgatttaagagcacgagcagatacataaactttcttaggtttaccatctaccatgatgcgtaccttttgaaggttagcaccaaatttacgttttgttgtattcaacgcgtgagaacgcttgttaccaaacgaagtcttgcgtccagtgattgcacatttagccattgtttctacctccttactgtcctacattgcacaaaaagtgcaggataaatcctccactatagtatcatgtaggtgtagtgaatgcaagatgtttaacacgtcttatcaagaaaaaaacttaacagtaaaagcttatcataatagaggttttaaatgatgaacttttattatatgtgatattgtagtaaaataacgttagctctgcaaaggatttatttttactttataatgttatgaatagaatcttattgaggataaaactgttaaatggtcagttcttaaatcgctaagggaggaaatataatggcaattgaaatgaaaacccagtacggacaaattgatatttcaacggaagtagtcgctgcgattgcaggtggcgcagcaattgattgttatggtatcgttggaatggcttcgcaaaagcaattaaaagacggcatcactgaactattggggaaagataactttagcagagggattgtcgtacgtaaagatgaagatgaccttaacattgacatgtacattatcgtaagctacggcaccaaaatttcagaagtggctcataacgtgcaaacaaaagtaaaatatcagcttgatcaaatgctcgggctatcagttgattcagtaaacatttacgtccaaggggttagagtgaccaacccatagtggagttaggaggaaaagtctgtgacgattcaaaagattgatgggaaacgttttgcgcacatggttcttgaaggagcaaataatctttcaaagaatgccaaaatggtagatgcgctaaatgttttccctgtaccagatggagatactggtacaaacatgaacttaacgattacatctggagcggctgaagtaagatcaagcagctctgataaagtaggagacgtagcatctctttttgcaagaggcttattgatgggtgcacgcgggaattctggcgttattctatctcagctatttcgagggttttcaaagtcaattgaaggaaagtctgagattacaagcgtcgagttagctgccgcacttgagaatggagtagattctgcctataaagctgttatgaagccagtggaaggcacaattcttaccgttgcaaaggatgctgctcgtaaagcagtgaagtccgccaagaaaatatcagacgttgtcgagctgatgcaggtggttgtaaaagaaggaaaagagtctttaaaccgtacgcctgatctccttcctgtattaaaagaagtaggcgtagtcgattctggtgggcagggcctattgctaatttatgaagggttccttgctgttctggaaggaaaagaaacacctgattcttccgttgatgaagagaagatggatgagcttgtgcgcgctgagcaccacaaaagtgcacagggtcatatgaaaacagaagacattgaatttggctactgcacagagtttatggttcaatttgaagaagaaaagcttgcccaatcaccttatgacgaggaagcatttcgaaatgaacttgataagcatggtgattccctgctagttgtctctgacgatgatctcgttaaagtacatatgcataccgaatatccgggaaacattatgacgtatgcacaaaattacgggagcttaatcaaaattaagattgagaacatgcgagagcagcactcaacaattgtgaaagaagagcgtccaaagcgggagaagaaagagaaacctgctgaacgtaaagagtacggtatcattacggtttcaatgggcgaaggaatcgcaacgttgtttgagagtcttggcgctaactacgtcatcccgggtgggcaaacgatgaaccctagcacagaagatatcatcaaggcaattgaagaagtgtacgctgataatatcattattttgccaaataacagcaatatagtgatgactgctcagcaggctgcttccgttgttgatgagaacgtcattgtcattccatctaagacggtgccacagggtatttcaagtcttcttggctttaacccttccgctagccctgaagcaaatgaaaatgcaatgaaagaaagtctttcagccgttaaatcaggtcaagtaacgtttgctgtacgcgatacgaagattgacggaattgatattgcgaaagacgactttatgggaatcgcggatggtaaaattgttgtttctaaacaagaacgtcttgatgtagcaaaggcgcttttatcatctatgattacagaagatgatgaaattgtaacgattatttacggggaagacgctgacccggaagaagcagaaacccttgttgcttttattgaagagcaatttgaagaagttgaagttgaacttcacgaaggtaaacaaccgatttatgcctatattatggctgtggagtagattgaataaatagttgtggaaaaagaaacgtggcatgagccaggttttctttttctgtatagaactccttttgttaaataaagcaagttgagaggtggcgtcaacgtgaagtttcgcagtgttttcgatataattggacctgtaatgattggtccatcaagctcccatacagctggagcagctagaataggtcgtgtggcaagacatttgtttggtcgtgagcctaagtcgatcaccgtttcactatacggatcgtttgctagaacctacaaaggacatggtactgatgtggcgctaattggtggcgttctcgattttgatacatacgatgagagaatcgtgaatgcgcttacaatagcaagggaaaagaaaatcaaagttcgctttacagaagaagatgcgatctcagatcatccaaatacagcgcgcatccacctatcagacgaaaagggagaacttgagcttgttgggatttccatcggcggtggtaaaatagaagttattgaacttaatggatttgcgctaggactttcagggaatagtccagcgattctcgttgttcacaatgaccgatttggcgcgattgcaggtgtatcaaacacgttagccaaacatgaaattaacattggtcacatgaatgtatcgcgaaaagagaagggcaaagaagcgctaatgacgattgaagtggatcaaaacattccacaaattgtattagatgaagttgaatcgttgcctaacattattcaagttgcaaaaattagcgattgaggcaaagaggaggaatgggtatgtttcgtaacgtagccgaattggtagaattggcgcaatcgaaaaataagccaatatcagaaataatgattgaacaagaaatggatttcagaggcagtacacgtgaagaagtttacaatcaaatgaaaaataatcttgttgtcatggagcaggcggttgaaagaggaattaatgaagatgtaaagtcacattccggcttaacaggtggagacgctgttcttcttcaaaactatatgaagtctggaaactcattgtcaggccatacgatgcttgatgctgttagtaaagcgatcgccacaaacgaagtaaacgcagcaatgggcacgatttgtgcaacgccgacagcaggctcggctggagttgtaccaggtactttatttgggatccgtgaaaaagtaaatccgacagaagagcagatggtaaggtacctcttcacttctggagcatttgggtttgttgtagcgaataatgcttctatttcaggtgcagctggtggctgtcaggctgaagtaggttctgcaacagggatggctgcagcagcaattgtggaactaatgggggggacgccagaacaatcttctcacgcttttgctattgcattaaaaaacatgcttggtcttgtatgtgaccctgttgcaggccttgttgaagtaccgtgcgtaaagcgtaatgcaatgggtgcttcaaatgcactcgtagcagcagatatgtctcttgctggtattacaagtcgtattccatgtgatgaagtaattgacgcgatgtataaaattggacaaaccatgccttctgctcttcgtgaaacggcacaaggggggcttgcagcaacaccaacgggacgtgagctagaagcgaaaatctttggagtatcccttgataggaaatgagtgagaaagaatggacgatcggattacgcaaataaaagggattggtgatgagaaagcggcttctctctcatcgatcggaattcataacatacaagatttaattgaatattttccatttcggtatgaagattatgagctaaaagatctagctgaagtgaagcatgaagaacgagcaacgcttgaaggaaaagttcatagtgaaccggtagtccgcttttatggaaagaagaaatcacgattgtccgtaaggctgttagtagggaaattcctcataacagccgttttttttaatcgtgctttcttaaaaaagcagtttacgctaggtcagattgttactgtaactgggaaatgggatcaacataaaatgaccctctcagcaaatggaattacgttttcaagtcataacccagacggcacgatagaaccgatctaccctgtcggtggggacgtaacggtgaaagcaatgaagcgttatattcagcttgcgttgaatcagtttggggaacaaatagaagaaaatcttcctccgcaaatgcttgagcggtataaattgatgccgcgaaaagatgccgtctttatgatgcacgccccaccttcacatgacgggcttaagcaagcaagacgtcgttttgtctatgaagaattacttcagtttcagctaaagatgcaggtgtttcgtaagcgtgaacgcgaaagtacaaaaggagcttcacaggtgtttgaaaaggagaaattggatgagtttattgaaagccttccattccctttaactggtgctcaaaatcgcgtagttggcgaaatattgaaggatatgcaaagtgactatcggatgaatcgactgctacagggagatgttggttcaggtaaaacggttgtggctgcgattggcttatacgcttcataccttgctggtcatcagggtgcattaatggtgccaaccgaaatactagctgagcagcattatgaatcttttcaagaacttcttggcgggaaattgaatgtggagctgttaacaggatctgtgaaggggaagaagcgacgtgagattctagaacgtctggctcttggagaagtcgatcttcttattggtacacatgcgctgatacaggatgaagttgtgttcgaaaacctcgggctcgtcattacagatgaacagcatcgttttggtgtaaatcagcgtcgtgttttacgagaaaagggactaagtccagacgttctctatatgacagcgacgccgattccaagaacgcttgccatctctgtttttggtgacatggatgtatctactatcgatgaaatgcctgcaggtcgcaaaccaattgaaacgtattgggcgaaacccgacatgcttcctcgagtgattgattttgtgaaaaaagaactggatcaagggagacagggctatgtcatttgtcctctgatcgaggagtctgaaaagcttgatgttcaaaatgcgattgacgtccattttcaaatgcaaacagctcttccgggttatcaggtgggcttaatgcatggacgacttagctcagatgagaaagaagaagtgatggaagagtttagtacgaataatgtccagcttcttgtttcaaccacggttgttgaagtaggggtgaatgtgccaaatgcgacgatcatggtcatctatgatgctgaacgctttggactggcacagcttcatcaactgcgaggccgcgttggtcgaggcagtgagcaatcttactgtgtgctacttgctgatccaaaatcagaagtcggaaaagaacgaatgcaaatcatgacggaatcaaatgatggtttcgtcctttctcagcgtgacttagagcttcgtggccccggggacttttttggacgaaagcaaagcgggctacctgaatttaaagtagccgatttagttcacgattatcgagtacttgaagtggctcgaaatgatgcttctgcacttgttgagtcgaccgcattctgggaagatgagacatatcgtagtttacgagactaccttactgaacaaggcgttttaagcggagaaaagctggattagcttgcataatgctaccgcaaagtatatactaccttttaggacctagtcataagactgagataaagaggatcacgtgatcctctttatccgtttattaatgctagataggcggcggtagtagatgaaaaggagtaagaaagaccggcaaagtcagcttaaggaaacgatcgagagcacaccatttattacggatgaagagcttgctgaaaagtttaaagttagcattcaaacgataagacttgatcgtttggagctgtctattccagagcttcgcgagagaataaagtacgtggctcagcagcagcttgatgaagtgaaagctctcccgatcgatgaagtgatcggacaagtgattgatctccagcttgatgaaagtgccatttcaatccttgatattcgtccggaacacgttttttctagaaacaaaattgctagaggccatcatcttttcgctcaagcaaattcacttgccgtagcgattattgatgatgaacttgcgctgacagccaaagcgaacattcgcttttcaagtcaggtgaaagaaggagaacgagtggtagcaaaagcacttgtcacagaccagcgaaaagacagaacgacggttgaagtgaatagctttgttcagaatgagaatgtcttttctggtgaatttgttatgtatcgctcgactaaatcctgaagggatgttgtttgaaaatgagacttgcaattgacgcaatgggtggagacaatgcacctgctgccataatagagggtgtatatgaagcgattgaagcgttcaatgatttgtctgttacggttgtgggagacgaaaagaaaatcaatccgctgttaaaaggaaacaaagatcgaatcacagtattacatacggaagaatacatatcatcagacgatcagccagtaaaagctgttcgaagaaagaaaaacgcttcgatggttttagctgtaaatgaagtaaaggaaggtcgggcagatgctgctatatcagctggtaatactggtgcgttaatggcagcaggattgctttatgtcggccgcattaaggggattgatcgtccgggattagcgccgacgctcccaacaatagatgaagctggttttgttctgctcgatgttggagcgaatatggatgcgaaaccagagcaccttcttcaatacgctcatatgggttcggtttatgccgagaaagtgcgaggtgtaaataacccgcgcgttggtttattgaacatcggtacagaagaaggaaaaggaaatgagctaagcaagcaggcatatgcactcctagagaatagtggcctgaactttgtaggcaacgtggagtcaagagacattcttggtaacgaagcagatgttgttgtgtgtgatggcttttccggaaatttggttttaaaaacaattgaaggtacagccttaacgatgttcaaaatgttgaaggaagaacttacaagctcgtttacaagtaaagtagcggcgggtgtactaaaaccgaagcttaagaatttatctacaaagcttgattattcggagtatggtggtgcaggattatttggtctaaatgctcctgttattaaagcgcacggatcgtcaaacggaagagctgtattcagcgcgattaagcaagctagaatgatggtgacaggaaatgtagtatctgcaattcaatcatctcttgttaaagaggaaggagaataaccatgggtaaaaccgcatttctatttccaggtcaaggttcacaggctgttggaatggggcaagaatttatggaagcttattcagtagcgaaagatgtatttacagaggctgatcatcgtctcaactttgagctaacgaaattaatcatgaacggaccaattgagacgttaacaagaactgaaaacgctcagcctgcgcttgtaacgacgagtgtagcagttcttgaagcacttcgagaaaaagggattacagcggattatacggccggtcatagtcttggcgaatattcagctctagttgcttcaggagcgctttcgttttcagatgccgttttcgctgtaagaaatcgaggtctttatatggaagaagccgttccttcaggtgaaggagcaatggcagcgattatgggtatggaacgtgaagaattgcaaaaagtggtcgacgaagttacggcttcgaccgcaacagttcagcttgcaaacttgaacagtcccgggcaaattgtcatttctggtgcaaaagcaggcgttgaaaaagcatctgaagttgcaaaagaaaatggcgcaagacgtgttattccgcttcaagtaagtggaccttttcattcaagccttatgaagcctgctgcagatcaactatcagcgattctagaagcgattgagattaaagatgcttcgatcccagttgttgcaaatgttacagctgaaccatctacttcaggagaagaaattcaaaaacacttattggaacaaatctattcccctgtgctttgggaagatacagtgagaaagctaatggatcttggcgttgatacctttatcgagattggtcctggtaatgttctttctggtctcgtgaaaaaagttaaccgtcgtgcatccgttcatgccgtcgggacgccagagcagctcgatcaacttattgaaaagttaggggaggaataaataatggctgaaaataaaacggctctagtaacaggtgcttctcgtggaattggacgtgcaattgctttagaacttgcgaaagaaggcatgaacgtggcagtcaactacgcaggaagtgaagcgaaagcaaacagcgtggtagacgagattaaggcagctggcggcaatgcaattgccattaaagcgaatgttgcaagtatggacgaagttcagggcatgattaaggaagttgtctcaacattcggtagtctggaagtgcttgtgaataatgctggcattacgcgtgataatctgattatgcgaatgaaggaagaagagtgggattctgttatcgacacaaacttaaaaggtgtctttaactgtacaaagtctgttactcgtcaaatgatgaaacagcgctatggccgtattgtaaacgtagcttctgtagtcggagtagctggaaatgccgggcaagcgaactatgtagcagctaaagcgggcgtaattggattaacgaaaacgactgcgaaagaacttgcaagccgtaacattaccgttaatgctcttgcccctggtttcattgaaacagatatgacggacgagctatccgatgaggtgaaaagcggaatgaaaggacaaattccacttggtcgacttggtgcagctcttgatattgccaaagcaacgaagttcctcgtttcagatgatgccaattatattacaggacaaacgcttcacattgacggcggcatgatcatgtaacttttttatcaacgcctagtttttttgttttatatatcctataatagcttgaggggaggtgagtctaatggcagatacactagagcgtgtaacaaagattattgttgatcgtcttggagttgaagaatctgagattaaaccagaagcttctttcaaagacgaccttggtgccgattcccttgatgtagtggaattagtcatggaacttgaagatgagtttgatcttgaaatttctgatgaagatgctgagaaaattgtaacagttggcgatgtaattgattacataaacagccatcaataatcttcaggttaacctgaagtgatggaataagccccgcttgacggggttttattcctgttaataaagctccagagtaaaaagatgatagtgataagtcgtggaggtatctatgtccaaatcaaaacattcaccaaaaacgagagccagacgtttcaaacctaagcattcacgacaactcgtggttggagaggcaatcaaatcgcaattcactgcttttcaaaaggaaattggtgtatcgttcgaaaatgaacagcttctttttcaagcttttacccattcatcctatgtgaatgagcatcgactgcatccgcagatggacaatgaacgtcttgaatttcttggagatgccgtacttgagcttacgatatcaagatacttatatgaaaagtacccaaatatgagtgaaggccagctaacaaagctaagagcagcaattgtttgtgaaccatcacttgttcaattcgcgaatgacatgaattttggccatctcgtacttcttggtaagggagaagagatgacgggtggaagaatgcgtccggcacttcttgcggatgtatttgagtcgttcgtttgtgctttgtatcttgatcaaggtctggaagtcgtctttgaatttcttgagaagtttgtttatccgaaaattaacgccggtgctttttctcatgtgatggattataaaagtcagcttcaggaagtcatccagcgtgaaagtcttggagttattgattacgtcattaccgatgaaaaaggacccgcacataaccgagagttctcgtcgaaagttatgttgaatggaaatgaccttggcgttggagtaggacgttcgaagaaagaagccgaacaaatggctgcacaaaaagcacttataaatttaaaagaacgtaatgaaaaagaatcctgagctcaggattctttttcattagggtgcttattcgactgtttaagaagcgcgcaattttcctagttcagctaaaatcgcttgcatttctgcaacgctgagcgattgcttcttattcagcatgacatagatttcataaatgtcatcataagaagataaatcgaatgattctggtttaatcatgcctgcgttgatcacttgcattttttctttaatgccctcgaccatatacgccaggttttcttctgatttaatcgtaagatccattagttccacctgccttatttaatattcaatgacgacagatcgccatgatatgtaccaatccctcatgagcctaactaatgttgttggactagaaggttttccttattgtaacatgtcttagctcagtatcgtagaggtcattgttttatgataaaataagacagttagtgaattgaaacgtacttaatttgcatacatagatgaaacagatgagggggaaagatgatgttcctcaaacgattagatgtagtcggctttaaatcatttgccgatcgtatttcagttgagtttgtcccaggagtaacatcagttgtcggtccgaacggcagcggtaaaagtaatattaatgacgccatcagatgggtgcttggtgagcaatccgccaggtcactgagaggcgctaaaatggaagatatcattttcgcaggaagtgatacgagaaaagcagtgaatttagcggaggttacgttaacgcttgataatacgaatcaatatcttccaatcgactataacgaagtcagcgtaacaagacgcgtttatcgatcaggagatagtgaatatcttttaaataaccagacgtgtcgacttaaagatattattgaattgtttatggactcaggtcttggaaaagaatccttttcaattattggacaaggtagaattgaagagatactaagtagtaaatccgaagaacgccgtaagatatttgaagaggcggcgggggttttgaaatacaagacgcgaaagacgaaagcagaaacgcgattaaaggaaacggaagataaccttcaccgcgttgaggatattttatatgaattagaggatcaagtagaaccacttcggatgcaggcatcgattgctaaggattatttgcagaaacgtgaagaccttgaaaagatcgaagcagcgcttaccgttcatgaaattgaagaatatcaccaggcttggaagctaaagaaagaagagcttgattctttaaaagcgaaggaacttacgttaaatgactcgatcactgtaaaaaaagagacgttagcaagtgcaagagagaagctagacaaatctgagcataacctagaaacataccaacaacagcttctcgatacgagtgaagagctagagaaacttgaaggaaagaaagaagttcttaaagaacggaagaaaaatgcgcatcaaaaccggtcgaacctagaagagcggatgacgtttttacaagagaaaaaaagctattatgaaaaggaaattgagcatcaccgcagtcgatttgatcagcagaaaaaagaattaggtcaattaaagtctagtttgaagaaagaaacagaacttctatctgatatagaacaagacattgagcaagagcttgatcgaatgaagtcagattactttgagctgcttaatgagcaggcgtccatacggaacgaaaatcgttatcttcaagaccagctttctatacttagtcagcgtaaagatcggcttgatggagataatcataaatatattgaagagcgaagcgccgttgacgaaaagaaagcagaacgctcagccaagttagctcagtcaaaacaagaacttgaagctcacgtctcgcgattctacaaaagcaaacatgatgtagaagagaaaaagaaagcacttggcgagaaggaatcaaagctctatcaagcgtatcaatatattcaacaatacaaatcaaagaaagaaatgttagaagaaatgcaggacgattatgccgggttcttccagggcgtaaaagaagtgctcaaagcccgtgaagacctttcaggtattgaaggagcggtagctgaactcattaccgtacctaaagatgtggaaacggcacttgaaacggctcttggaggagccatgcaaaacgttgtcgtccaagatgaggcatcgggcagacaggcaatcacttatttgaaaaagaatcgctcaggacgagctacttttcttcctctgtcagtcgtgaagtcacgaaagatatcgagctatgatttagaacgcgtaaaacaaaacgaggcattcgtaggcgttgcttctgacctcatcactttcgatccaaagtatcaggctgtaatggagaatttattaggctctgttcttgttgccaaagaactaaaaggtgcgaatgaacttgcaaaagtcatgcagtaccgaacacggatcgttacgttagagggagacgttgtgaatcccggcggctccatgagtggaggaagtgtgaagcagaaatcctcatcactattaagccgtcaacgtgatcttgaaattctgatcaaaaaacttgaggacatgcagaaaaagacgacgggtgttgagcaagagatcaagaaggataaagtcgctttagctgctctagaagaaaagctagatgagatgcgcgaacgtggcgaaaacctcagacttgaagagcagtctttattaggagacttaagagcgattgaaggagacgaacgtaattcgaatgaacgtcttcagctatacgatcgtgagaaaaaagcgattgaagaagagattgaaacgcatcataagcgccatatctatcttatagaaagactcgaaacgattacgaaacaagcagcaacacttgaaagtaaaattgataacttaactgcgaagaaacaaactcagcaaacgtctcgtgaaacaattcaaaccgaaattactgagctgaaagtaaaagtggctgagcaccagcaatcattccaaaatcaaaaagaaacgcttgatcgtttaacaacagaacagaatgagacgaatacacagttggctgaaacgacagaagaattcacccttttatctgaagcgatgtcttcaaattctaacggagaagagaaactggaccaaaacattgtttcgttccgcgctgagaaagataaattacttcagacgcttcaaaatgaacgagaagtaaagctttctctgcaacaagagattgaaacggttagtacgaagctggattctcttatcgcagaggacaagcagctctcaggattaatgcaggctgttgaagttagcattaatcgtttggatgttgaactcgagaatagattagcgattttaagtgaggaatacgagttaacctatgaagcagcgaaggaaaagcatgttctttcccttgaacccgaagatgcaaggcgaaagctaaagctcattaaattagagattgatgagctaggaaccgtgaaccttggtgcaattgatgaatacgatcgcgtcaatgagcgctatacgttccttagtgaacagcaagcggatcttcttcaggcaaaagaaacgctttatgcggtcattaaagaaatggatcaggaaatgaagaaaagatttgaagagactttcacgaaaattcgtgctcagttccaaatcgtttttaaagaattgtttggtggagggaaggcagatcttgtcctcactgatccggataacctcctttcaacaggggtcgatattctggcacagccgcctgggaaaaaattgcaacaccttgctcttctttcaggaggagagagggcatttactgccattgcgcttctattttcgattttgaaagttcgtccagtaccattctgtgtacttgatgaggtagaagccgctttagatgatgcgaatgtggggcgtttcgctaagtacctgaagcaatttagtgaaaaaacccagtttattgttattacccatagaaagggtacaatggaagagtcggatgtgctttatggggtaacgatgcaggagtcaggtgtgtctcgactcgtttccgtaagacttgaagaatcgaagcaattaatatcgcaataacaagtagggggatgcaaagtgagtttttttaaaaagttaaaagataagttcaccacacaaacagatgatgtaacagggaaatttaaagacggactcgagaaaacaagaacgtctttctcaacaaaaatgaacaatctcgtaaaaaactatcgaaaagtagacgaggagttcttcgaagaattagaggagcttctcattagtgctgacgtcggtgtagcgacggtaatggaccttattgacgttttaaaggatgaagcaagaacgcgcaatattaaagatacgaaagaacttcagagtgtcatttcagaaaaattagcggagcttctccataaatctgacgaagatggttcgcttaatattcaagaagagggactaacggtcttcttattcgttggggttaatggggttgggaagacaacgacaatcggtaagcttgcgcacaagtttaagcaagagggcaagaaagttgttctcgcagcaggagatacgttccgagcaggtgccattgaacagctagatgtatggggagaaagagctggcgtagatgtgatcaagcatcaagctggctcagatccagccgcagttgtttttgatgctgtacaatctgctaaatcacgtaacgcagatatattgctttgtgatacagccgggcgtcttcagaacaaagtaaaccttatgaacgagctagaaaaagtaaagcgtgttattcaacgtgaagtaccatctggtccacatgaagtgattcttgttcttgatgcgacaacaggtcaaaatgcgatgagtcaggcaaagcaatttgggcaatcaacggacgtgtctggtattgcattaaccaagctcgatggaactgctaaaggtggcattgtactggctattcgacatgagcttgatatccctgttaagctcgtaggacttggtgagaagatggatgatttacaggaatttgatccggatacatttgtgtatggattattctcttctatcattgaagaagaggaagaaaacgaagaataaaatcttcgtaaattgtgttaagaaaaaatcttgacaaataaaatgacgcatagtaatataattaacgtaaaggtgattaccttaacaaggggctgttaacaatgctagagaaaacgatgagaattaactcgttatttgacttttatcagtcgcttttaacaccgaaacagcgtaattatatggcattgtattaccttgatgattattcattaggtgaaatcgcagaagaatttcaagttagccgtcaggctgtctatgataacattaagcgaacagaacaaatgatagaagaatatgaagcaaaactgttgctattcgagcgatacatcaaaagacaggagctgttagaaaagctcaaggaagcgatcatgagtgagaatgaaaactcgaaggcgctgtcgttgataacatctcttgaaaaactggattaggaggcggcgaacatggcatttgaagggttagccgaccgactgcaagacaccctgcagaagatacgcggtaaagggaaagtaacggaagctgacgtaaaagaaatgatgcgtgaagtaaggttagccttgcttgaagcggacgttaactttaaagtcgtaaaacagtttatcaacaaggtcaaagagcgcgccgttggacaggaagttatgaaaagcctgaccccagggcagcaggtcattaaagtcgttaatgaagagctgacagcgcttatgggtggagaacagagtaagattgctgtttcaaaccgcccaccgactgtgattatgatggccggtctacagggtgcgggtaagacgacaactgtcggtaagcttgcaaaccatttacgtaaaaatcataaccgtaaaccacttttagtagcggcggatatttaccgtcctgcagcgattaaccagcttgaaacactcggtaaacagcttagtatgccggtcttctcgatgggtgatcaagtgagtccggtagaaattgctatcaaagcaattgaaaaagcaaaagaagaacatctggactatgtcattattgacacggcaggccgcttgcatattgatgagaatctgatgcaggagctaaaagatgttaaagaagctgttacgcctgatgaaatcttcctagtggttgattccatgacagggcaagacgctgttaacgttgctgaaagctttaatgatgcacttgatattacaggtgtcgttctaacaaagcttgatggtgacacgcgcggtggtgctgcactgtcgatcaagtctgtaacagataaaccgatcaagttcgcaggtatgggtgaaaagcttgatgcactagaaccgtttcatcccgagagaatggcttcgcgaattctcggcatgggtgacgtgctaacgctcattgaaaaagcccagacttctgttgatgaagacaaagcgaaagagcttgagaaaaagatgcgaacgatgagttttacgtttgatgatttccttgatcaacttggtcaggttcgaagcatgggaccacttgatgaattgatggacatgattcctggtatgaataaaaaagccatgaaaaatgtaagtgttgatgaaaaacaaattggccgggttgaagccattattcagtcaatgacaacacgtgaaaaagaagagccagatattatcaatgcgagtcgcaaaaagcgaattgccgtcggaagtggtacgtctgtgcaagatgtcaatcgtctcttgaagcaatttgatgagatgaagaagatgatgaagcagatgaccaatatgtctaaaggcggtaagaaaaaaggtaagggcatgaatttcccattcatgcaataaaaatgaagtaaattttctctttacaagagtataaatttatgatattatattgatttatgtgaacattttttggaggtgaaagacatggcagttaaaattcgtttaaagcgtatgggtgctaaaagagctccttactatcgcgtagttgttgctgattcacgtgcaccacgtgacggacgcttcatcgaggaaatcggaacttacaatccggttgctaatccagttgaagtgaaaatcaacgaagagaaagctcttgattggatgcttaaaggcgctaagccttctgatacagtacgtaacctattctccactgcaggacttatggagaagcttcacaacgcaaaaaacacaaagtaatttaacaccttagaggaggctttcttgaaagcctcctttggtgtatcctggtccatcatttctaaaaaggtgggagacgatcatggaagccctagttgaaacaattgtaaaagctcttgtcgatcatcctgatgatgttcgagttgaaaaagaagcaacaaacagcctggacatatacaagctttacgttcatgccgatgatacaggtaaagtgattggaaagcagggtaaggttgctagatcaatccgaacagtgatgaatgccgcggctgttcagtcaagcaaacgcgtacagttggagatactctaggggagcttacactcctctttttttatttgtaactttaaagaccgataattattacatacggagggcattgcgatgaaaatcattgtaacgtatgatgtgaaacaagttttaacagagcaaagccgggcttcctatttagatcaatggcaaaaagaacgctcagcccttcaacaggaaaaggaacatctcgtatttgaaatgaagcgattgcaaaaaaagcgtccgtctgaccacaaatggattgccgatcagtttgaaaaagaaatccggtcgagaacggaacggatgtcttatctagattttaaaattgatcagcttgaccagttatcgctagggtctgaaatccacgatggggagattgaatcgattcaagaggttctagttggtgaaaagtggcatgcgcgagagcaaaaaggtaaaatagtcattaaagacgggatcgtgcaaagcattgtccctgactccacaggaaaggatatcacgatatgacagaatggcttaatgtaggtaaaatcgttaatactcacggcgtgcgaggagaagtgcgcgtgatttcaagaacggacttcccggaggaacgttatgcggttggcagtaagctttacttatttaaggatgaagaaccggtttctttaaccgttgcctctcaccgtaaacataagcagtttgatttactgacatttgaaggctttcataatattaacgaagtggttcatatgaaggaaggcattctaaaagttaaggaagatcaaggtgggttgcttgccgaagaagagttctattaccgagatatcattggacttgaagttcatacagtagagggcgaatatttaggtaaaatcaaagaaatattatcacctggagcgaacgacgtttgggtagttcaaagtataagcggtggtaaagaccttttattgccttatatcgagcaagttgtaaagcaagttgatttagcggaagggaaagttaccgttcatttgatggaaggacttcgtgattagcatgaaaattgatgtgctttctctgtttccagaaatgtttacaggcgtgtttaaccattctatcttaaaacgcgctcaggataatggagccgtctcttacaatgtaaccaatttcagagattacagtttgaacaaacacaaaagcgtggacgattacccatatggtggtggcgctggaatggtattaacgcctcagccggtttttgatgcggtcaatgatctttctgaaggaaagcgcccacgtgtcattcttatgtgtcctcaaggagagaggtttacacagaagaaggcagaagaattagcgaaagaagagcatctcattttcatatgcggtcattatgaagggtacgatgagcgaattcgagaaaaccttgtcacagatgagatctcgattggagattttgttttaactggtggtgaactcggtagcatggttgttattgatagtgtaactagacttctccctggtgttctaggaaatgatacgtcagctccaatggattcctttagcagtggattacttgaacatcctcattatactcgtcctgccgaatacgaagggatgagtgtgcctgatgtgcttatgtctggtaatcatgaggcgatacgcaaatggcgtctcaaagagtcgttacgacgcaccttgaatagaaggtcagatcttctaaacgagaaagacttaacaaaagaagagcagaagttattaagtgaaataaagagtgaaaaagaatgaattcattcttgtaatctaaaaagtgctatgctatgataacagttgtggcattagtcacgtattacgatgttccgctgtaatgtaagacgatttatatgagcatctgtgtggaaggagggttacttgatgcacaagttaatccaggatatcacaaaagaccaacttaagtcggatcttcctaatttccgaccaggagatactgtgaaagttcacgttaaagttgtcgaaggcactcgtgagcgtattcagttattcgaaggtgttgtgattaaacgacgtggtggcggaatcagcgaaacatttacagttcgtaagatttcttacggagtaggtgttgagcgtacattcccagtacattcaccgaaagttgctaagcttgaagttgctcgtcgcggtaaagttcgccgtgctaagctatactacttgcgtgcacttcgtggtaaagccgctcgtattaaagaaattcgataaagtaagacacggagaaggagcttgcattgccaggctccttttttctattgaaaaaatcggcatatgaaaaaaacgtcactctgtgataaaataaagcgaattacgaaggtttgtaggaaaggcataaggggaaagaagtaggtaaaaaaagagcctttcattaggaggaactagcatgaaaagcaccagatcagcagagaaaaaagattcctgggagtggatacgtgcgctcattattgcttttattctagcaggagccgttcgctattttatttttgctcctattgtagttgatggagaaagcatgatgccgacgctgcaagatcgtgaccggatgatcgtgaataaaatcagttataatattggtgatgctgaacgtttcgatattattgtatttgaggcccctgaaggcaaagattatattaaacgagtgatcggtcttcctggagataaggtagagtacaaaggtgatatgctatacgtaaatggtaaagcaatgaaagaaccttatctagaatcatataaggaagatttattagagggtaaccttacctatgattttgatctaactggagtaactggtgaagcaaccgttccagaagggcatttgtttgtaatgggtgacaatcgacagcatagtaaagatagtcgatccattggcttcgttcctgtagaaaaagtaataggagaagcaaacgttattttttggcctttaaatgatatacaagtaatggaatagtgtggggtgtattcccgcatgatttgagaataggtggagattgcatgacgattcaatggtttcccggacatatggcaaaagcacgacgggagattaccgaaaagctaaaaatgattgatgttgtaattgaactagtggatgcacgaattccgcttgcttcaagaaatccgatgattgatgaaattgtttcgtcaaaaccgagactcattttgctcaacaaagcagatatggcggataatcagaaaacagccgagtggaagcactattttcagtcacagggtcataaagcgttagcgattgattcacaaacaggtaaaggcgtgaaaagcattcctgctgctgcgagagagctgatgagtgataaaattgatcgcatgattgagaaaggcatgaagccccgcgctgtgcgtgctttaattttaggaattccaaacgtagggaagtcgacgttaattaaccgtttggcagggaagaagattgctaaaactggtgatcgccctggtattacaaagaagcaacagtggatcaaagtgggagatgagatggatcttctcgacacgccgggaatactctggcctaaatttgaagatcaaattaccggatataagcttgctgctacgggggcaattaaagatgaaattcttgattttcaagatatttcggtattcgtgctcaagtttatgagtgaacattatcccgatagactaatggatcggtatcatcttgatcacatcccggaagatgttgtggagttgtttgatgaaatcggaaaaaaacgtgggtttttaatgagtggtggctggattgattacgataaaacagctgaaaccgttcttcgagagctacgaagtggtaaattgggtgacgtatcgctagaaacgccagaaaggtaaggccatgagccttaccttttttaagtgaacaataagaaagaggggatcatatgagcgatcaactaaagtcgattaaagaaattgatcaaatgttgaaggaagggcaatatacgaacgaagattgggaacaatggaagcaagatgaacggaaaggtgtagtacgcttacttgctagagaaggaaagaaagagcaagaaaaaatgaagattcttaagatgcatgaagaaatgagtggcctagaagctcattacagaggagaaggtcgtctttcgatagcaggagtcgatgaagtaggaagaggccctctagcaggccctgtcgttgcttcagcagtcatattaaatcctgaagtgccgattcttggccttcaagattcaaagaaactgtcgcatgcgaaattaaatcacctttttgatcaaatacataaggatgccgtcgctatcggagtaggcgtcgttagtgcagctgaaattgatgaattaaatatttatcaagcgacaaaaaaagcgatgcaacaagctgtcgaggggttacgtgtacaagctgatttcttacttgtagatgccatgcacattccgcttcagatcgatcaggagtcccttattaaaggggacgccagaagtgttagtattgcagccgcatccatcattgccaaagtgacccgtgatcgcatgatggtgaagttagcagaaacctatccaatgtatggatttgagcgacatgtaggctatggaacaaaggagcatctttctgcccttgatgaatttggtattacagaagttcatcgaaaatcatttgctcctgtaagagaccgtttaagcgtatgaatagatagaaaaggttgatactatacctattctaatgtgaaggagcaattatttgtgaaagatccaggacctcaagaaaagaatgaatctttttatgaagaagcaggagaagagttcggtgtctataccccagcagcagcaagagaattaacgattacggaccataagaagagggagcaagaaagctcgcctaagaaagcgggaagaaatgagcaggaagaggggaggtgaccccctcttcttttttgattttacttagtttattgtaaatttaccacgtggcactcattttcgcagaacaagcgtgaaataagcggaatgattcgttttcagacgatgaattggaacaatttttgcaagaaagaaaagagactttatgcaaaagggtagacaatcggtgtgaattttctatacaatgaaaacgtcgtcaaagatttgattgactaggataggaggatgagagaatgaatatccatgaatatcaaggaaaagaagtcctaagaagctacggggtatccgtccctaatggacaagtcgcatactccgcgaaagaagctgtggacgttgcaaaacaattagacagcagtgtttacgttgtaaaagcacaaatccatgcaggtggtcgagggaaagctggcggagttaaaatcgctaagaaccttgaggaagttcgtacatatgctgaggagatcctcggaaaaacacttgttactcatcaaacaggaccagaaggcaaagaagtaaagcgcttacttatcgaagaaggttgcgatattaaacaagaatactacgttggccttgtgcttgatcgtgtgacatcacgtgttgttatgatggcatccgaagaaggtggaactgaaattgaagaagtggctgaacatagccccgagaagatcttcaaagaagtgattgatcctgccgttggtcttcaaggttatcaggctagaagactagcatttaatattaatattccaaaagaacaaattaacaaagcagtaaagttcatgcttggattgtataaagtttttgttgaaaaagatgcttctattgctgaaatcaacccacttgtgacaacgggtgatggaaatgtaatggcgcttgatgcaaagctaaactttgatccaaatgcactttatcgccataaagatattcttgaacttcgtgatcttgacgaagaagatacaaaagaaatcgaagcatcaaaatatgagttaagctacatcgctctagatggcaatatcggctgtatggttaacggtgcaggtcttgcgatggcaacgatggatattatcaagcattacggcggcgaccccgctaacttccttgacgttgggggcggcgcaacggctgagaaggtaacggaagctttcaaaattattctttctgacaaaaacgtaaaaggcatctacgttaacattttcggtgggatcatgaagtgtgatgtaatcgctgaaggtgttgtagaggctacgaaacaagtaggtcttgaaattccgcttgttgtacgtcttgaaggaacaaatgttgatcttggaaagcagatcctgaaagattcaggattaaatattaccgctgctgagtctatggctgacggcgcggaaaaaatcgtttcattagttaagtagaaaggcgggactaggaatgagcgtatacattaatcaagatacaaaagtcatcgttcaagggattacgggatctgttggtttatttcatacacagcaaatgcttgagtatggtacgaaaattgtaggtggcgtaacgcctggtaaaggcggtactgaagtggaaggcgttcctgtatttgatacagtggaacaagccgttcaaaaaacaggcgctaatgcttctgtcatttatgttccgcctgcttttgcagccgatgccattatggaagcagtagacgctgaaatggaccttgcgatttgtattacggaaggaattccggttatcgatatggtgaaagtaaagcgttatatggaaggaaagaaaacgcgtcttgttggaccgaactgtccaggcgtgattactcctgaagaatgtaagatcggcattatgcctgggtacattcacaaaaaaggtcacgtaggagttgtttctcgttctggtacgttaacgtatgaagcggttcatcagctttcagaatcaggtattggtcaatcaacagccgttggtattgggggtgacccggtgaatggcacgaactttatcgatgtcttgaaagcttttaacgaagatgacgatacgtatgcggtgatcatgatcggtgaaatcggcggtactgctgaagaagaagcggctgaatgggtgaaagcgaacatgacgaaacctgtagttggctttatcggaggtcaaacagcgcctccaggaaaacgtatgggtcatgctggtgcgattatttctggtggtaaaggtacggctgatgaaaaaatcaagacaatggagtcttgtggaattaaagtcgctccaacgcctgcagtaatgggtgaaacactgatttctgttttagaagataagggcttactagagaagtgcacaacacataaggcttaatcaaaatagctcccgttttgggagctatttctcttatacatagcgggcatgcgataaattttattcttgataggagagaaccgtgattgagaacatttagaagccggttaattcagttgcatcagtgccgggggtgtacctggaaactgatgcaatcctttctcatatttgacccaacgcttcaaagcatatatgatatgtctgctactcagttaaggcaatttggtttatcaaacgaacaagctggatatttatatgaagatcttcattttactaaaccatggagattggctcattttaaagcgggcgaaattcgcgtaataacaagatttgataaggcataccctgaacaacttacgcatatttatgatgcaccgtgggtgatttattgcattgggaataccacgcttctaaatgaacgtcgcttgttgagcgtagttggctcacgaaagcattcaccagatgcacgtgaaatgatgaaccttatcttaacaccgatcgtatcgagtggatggacgattgttagtgggctagccctcggtattgatacacttgctcatcagcttgctctcgatcatggtgcagggacgatcgctgtacttggcggtggatttaaatggatttatccgaaagaaaaccagctgctagcttcttccgttgcgagagacgggctccttttatcggaatatccacccaattgtcgacctgaaaaacatcactttccggaacggaatcgcattattagtggattatccgctggaacgtttatcgttgaagcgcaaaaacgcagtggttcgctcattacagctgaccaggccatggaacagggacgcgaagtattttgcttacctggaaaaataacagatccgtctgctgaagggacaaatcgcctcattcagcagggtgctaaacttgttttagaagcaaatgacatcctcaatgaactaccgaattttcatgaaaaggatactagcactatttgacaaacaagttttgactattgaataataaggaagattttaaaatttacctcaatggggggaggaaacgtattgtggcagattatctagtaattgttgaatctcccgctaaagcaaaaacaattgaaaaatatttaggaaagaaatatcaggtgaaagcctcattaggtcacgtcattgaccttcctagaagtcagatgggcgttgatgtggaaaacaactatgctcctaaatatataacaatacgcgggaaaggccctgtcctaaaagaaatcaaagatgcagcaaaaaaagcgaagaaagtctatctcgcagctgaccccgatcgcgaaggggaagcgattgcatggcatcttgctcacagtttaaaaattgacgagcaaacagagtgcagggttgtctttaatgaaattacaaaagatgcggtaaaggatgcgttcaagcaaccgagaccgattaacatggatctagtcgatgctcagcaagcaagacgtgtcttagaccgtttagttgggtataacattagtccattattatggaaaaaagtaaaaaaaggtttaagtgctggacgagttcaatccgttgcagttcgccttattattgaaagagaaaaagaaattcaaaatttcgaagcagaagagtattggaaaatcaaagcgtcgtttgaaaaagatggagaacaattcgaggctggtttctacggagtagatggaaagaaaacggatctgcaatcccgtgaagatgtcgacaatgttctaaaacgcattgaaggcgatcagtttaatatccagtctgttcaaaagaaggaacgtaaacgaaacccggccttaccttttactacatcttctcttcagcaggaagcggcgagaaaacttaatttccgcgcgaagaaaacgatgatgctcgctcagcaactttatgaggggatcgcaatcggaaagcagggaacggttggtttaattacgtacatgcgaactgactcaacacgtatttctgaaacggcgaaggatgaagcgaaagaatacattcaaggtaaatatggcgacacatacttatcagctaaaaagcctactaagaaacagtcaggaaaatcacaagatgctcacgaagcggttcgaccaacatcggttatgcgtgatccatctgaaatgaaggcttacttaaagcgtgatcagcttcgtttatacaagcttatctgggagcgttttgtagcgagccagatggcgccggctatcatggatacgatgagcgttgatctagaaaacaacggaacgattttccgtgcgactggttctaaagtgaaatttaaagggtttatgaaggtgtatgttgaaggaaatgatgacaataaaaaggaagaagataaaatgcttcctgaccttgaagaaggaatgaacgtatctacttcagaaattgatccgacacagcacttcacacagccaccgccgaggtattcggaagcgcgccttgttaaaacaatggaggaacttggtataggaagaccatctacttatgcaccaaccctcgatacgattcagcgtagaggatacgttgcgttagaagataagaaatttgttccaactgaacttggcgaaatagtgttagagctgattttggagtttttccaggatattatcaacattgaatttacggctggcttagaaaatgatcttgacaaaatcgaggatggcgaggcagaatggatttctgtcatcaacgaattttatcaaaacttcgaacagcgccttaaggtagcagaggaagaaatgaaggaagtcgaaattaaagacgaacctgctggagaagattgtgagaagtgcggttctccaatggtaattaagatgggacgttatggaaagtttatggcttgctcaaacttccctgattgtcgcaatacaaaaccgattctaaaagaagttggcgttacttgtccgaagtgtaaagaaggtaatgtcgttgaacgtaaaagtaagaaaaatcgccttttctatggttgtgatcgtttccctgaatgtgatttcctatcgtgggataaaccgatcaaacgtccatgtcctaaatgcggtgacttacttgttgagaagaaaacgaagaaaaagaaagaaatcaagtgtgtgaactgtgatttcgttgaagaagaaaattagtaaggggttttagcaatgagtaaacacgtgacggtgatcggcgctggacttgctggaagtgaagccgcgtggcagcttgcaaagcgaggagtggatgttcatctttatgagatgcgtccaaagaagcaaacgcctgctcaccatactgataaatttgcggagcttgtgtgcagtaactcgctaagagcgaatacgttaacaaacgcagtcggagtgttaaaagaagaaatgcgaaagatggactctgttattattaactcggctgatgaatgtgcggtccctgctggtggtgcacttgcagtcgatcgccatgaattcgccgctaaagtaacggagaatgttaaaaaccatcctaacgtaacggttttttcagaagagtgcacaaaaatccctgatggaccaacaattattgcaacaggtcctcttacatcgaaagatttatctgatcagttgaaggcgctaagtggtgaagagtatttgtacttctatgatgctgctgcgcctatcattgaaacagaaagcattgatatggacaaagtgtacaagaagtcccgttacgataagggagaagcagcgtacttaaactgtccaatgacggaggaagagtttaacacgttctacgaagcgcttatatccgctgaaacggttccgttaaaagaatttgagaaggaaattttctttgagggctgtatgccgattgaagtcatggcccaacgtggtcagaaaacgatgacgtttggtcctcttaagcctgttggattagaagatcctcgcacaggtaagcgtccttatgcggtcgtgcaactaagacaggataatgcgtccggtacgctttacaacatcgttggtttccagacgcaccttaaatggggaccacaaaaagaagtgattcgcttaattccgggtcttgagaatgctgatattgttcgttatggcgtgatgcaccggaatacgttcattaactcgcctaatctattaaaaccaacctatcagtataaagaacgtgaaaatctctttttcgctggtcaaatgacgggtgttgaaggctatgttgaatcggcggcatcaggtttgatcgctgggtttaatgctgctcggctcatgaatgatgaagagccgttggtatttcctgaagaaacggcacttggtagcttagcgaattatattacgacagcgaatccagataatttccaaccgatgaacgctaactttggtttgtttccaccacttgaaacgcggatcaaaagcaaaaaagaacgcaacgaaacgatcgcgaatcgagccttagaaacaattcagaattttgtaaaaagattgtaaatttctattgctaaggcttctaaattgtgttacgatttagaagccttttgaggtgataacgatgaataacaatcaacaagctcatattcaatcattttctgagtatcttcagattgaaaagaattgttcaccacatacgatctcaggttacttacaggatattgaacatttcaggtcttttatgaagcagcagactatcgatgtctttgctgctgtttcttatgcagatgtcagaatttatttaactgagcttcatgagcgaggttacgcaagaaaaacagcagcaagaaaaatttcaacgttacgaagcttatatcgattccttttacgtgagaacatcgtagagattaatccctttacaatgagttcgctgccaaaacaagaaaaacgtcttccgcaatttttgtacgaaaaagaacttaacgtgctttttgacacgccagatacaacgaagccgcttggtcaacgcgacagagcgctgctcgaagtactatacgggtgtggcatacgagtgagtgagtgtgttgggcttaatttggaagacattgattttgcgattggaacgatttttgtacttggtaaaggacgtaaggaaaggtatgtaccaatagggagtttcgctatagatgcaatgaaagagtacattcatgatggacgagaacagttgctatcgtcagggaaagagccgacaaaagccctgttcctaaattttagaggtagtcgtgtgacggcaagaggtgttcgtacaattttagataagattgtaaaagatgcttctttgcatgtacatataagcccgcatgtgatgagacacacattcgcaacgcatttgctgaatgaaggggcagacttacgttctgtgcaggagctattagggcattctgatttatcatctactcagatctatacccacgtgacgggagatcgattgcgaaatatatacatgaaccatcacccaagagcttaagggctcgggaggaggaacttatgggagactttcattctacaacgatatttgccgttcagcataatggtgagtgtgcaatggctggtgacggtcaggttacattcggaaatgctgtggtcatgaagcatacagctaagaaagtaagaaggctttttcatggaaaagtagttgcgggatttgctggatccgttgctgatgcttttactctttttgagaaatttgagggcaagcttgaggaatttggtggcaaccttcaacgtgcagctgtggaacttgctaaagagtggcgcagtgatcgcgtgttaagaaagcttgaagcaatgctaattgtaatgaacaaagatgagctattgcttatctcaggtactggtgaagtgattgaacctgatgatggcattctttcaattggttcaggatcaaactacgctctttcagcaggcagagcacttaagcgttatagtgataacaaaaccgctgaagaaattgcacgagcatctatggaaattgcatctgaaatatgcgtgtacacgaatgaccaaattatcgtagaaaccatttagtatataaaatgtatctttggaggagatcgtatgtctaatccattaacaccgagacaaattgttgaaaagcttgatcagtatattgttggtcagaatgacgcaaagaaggctgtcgcagtggcattaagaaatcgataccgccgtagccagctgagcgacaaactgaaggatgaagtgaatccgaaaaatatcttaatgattggacctacaggcgtaggtaagactgagatagcacgtcgacttgctcgccttgtcaatgcgccattcattaaagttgaagcaacaaaatttactgaagtaggttatgttggtcgagatgtggaatcgatggttcgtgatctcgtggaaacatcaatcaggcttgtcaaagaagatcgtatggaacaggtgaaaggcaaggcggaagaaaatgcgaacaaacgcattgtggaattgcttgtaccttctagtaaaaagcaaacccaatacaaaaatccgcttgaaatgttatttggtaatcaaggacaagaggaaacagcgaaccagtccgcaagtgaagatcagtccattgcatctaggcggaagcaaatggctcagcagctcgcacttggcgaactggaaggtcgcatgattacagtggaagttgaggagcaaaacaactccatgatggatatgttccagggcgctggtatggaacaaatgggtatgaacatgcaggatatgctcggcaacattatgcccaaaaagaagaaaaagcgtaagctgcctgtctcagaagcaagaaaagttttaacgcaggacgaagcagcaaaactggtggatatggacgaagttgcccaagatgctgtttcaaagacagaacaatcgggtatcatcttcattgatgaaattgataaggtagctgggaaaagccagcaatcagctgatgtttctagagaaggtgttcaaagagacatcttaccgattgtagaaggctcaacagtaacaacaaaatatggacctgttaaaacagatcacattttatttatggctgcaggagctttccatatgtcaaaaccatctgatctgattcctgagctacaggggcgtttcccaattcgcgtagagctatcaagtttaacggtagacgactttaagcggattttaacagagccagataatgctcttgtgaagcaatatacagctttattagaaactgaaggtattaaagttgaattttctgacgatgctattcttaaaattgctacaattgctacagaagtgaatcaggacacagataatattggtgcgcgaagacttcatacaattttagaaaagcttcttgaagatctttcattcgaagcaccggacattaatctagacagcattacaatcacaccagagtatgttgaggaaaaattagcttctattgcgaagaaccgtgacctcagccaatacatcctataatacatacaggaggacaaaacaatgaatttacttgaaaaaacaagaaaaattaatggtatgctacaaaagtcagaggggccagttaactttaccgatatggcagaaacgctacgtgacgctattatggcaaacgtatatgttgtaagccgcagaggtaaattacttggcatcgcaattaatcaagaaattgagaacgaacgtatgaagaatatgttctcagagcgccagtttcctgaagaatatacgcagaatctctttaatattggtgaaacgtcttcgaaccttgatattacaagcgaatacacagctttccctgtagagaatcgtgatcttttcgaaaaaggtctaacaacgattgtaccaatcgttggtggtgggagccgtctaggtacgctcattctttctcgtctaagcgattcattctcagatgatgatcttttattagctgagtacggagcaaccgtagttgggatggagattcttcatgagaaagccgaagaaattgaagaagaagcaagaaacaaagcagtcgttcagatggcgatttcttctctttcctatagtgaacttgaagcaattgagcacattttcgaagaacttgaaggaaacgaaggccttctcgttgcaagtaaaattgctgatcgcgtagggatcacacgctctgtaatcgtaaacgctcttcgtaagcttgagagtgctggtgttattgagtctcgttctctaggaatgaaaggaacttatattaaagttcttaacgacaagtttcttgtagaactatcaaaactgaagacccaataatcgatcaaacgctccgagaactctcggagcgtttttaatagaatgtggtattttcaacattacttttatgagtggttctttggattgctaagcttttatatgtactgtgagagtaagttagtataggtattcgtggaatttaagatttaaacttgcgacttgtcacatgatatgatatattaatcaacggtgttaatcacacacgcttgttgatttggaaagtggtgctgcagacgcagttttttctgaaatagatgcaagcggaggataaaaaaaaccattaggaggaacacaatcatggcagtaatctctatgaaacagcttcttgaagctggggtacacttcggtcaccagactcgtcgttggaacccgaaaatgaaaccttatatcttcactgaaagaaacggtatctacattatcgaccttcaaaaaacagtgaagaaagtcgaagaggcttataacttcgttcgtgacatcgctcaggacggtggtaaagttcttttcgtaggtacaaaaaagcaagcgcaagattccgttaaggatgaagcgatccgtgctggtcaatactacatcaaccaacgctggttgggtggaacgcttacgaactttgaaacaattcaaaagcgtattaaccgcctgaagagccttgagaagatgcaagaagacggtactttcgaagtactacctaaaaaagaagttatccttcttaaaaaagaaatggatcgccttgaaagattccttggtggtattaaagatatgaacggcgttccagacgcattgttcgtaatcgaccctcgtaaagagcgtatcgctattgctgaggctcgtaagcttaatatccctatcgttgcgatcgtggatacaaactgtgatccagatgagatcgactatattatccctggtaacgacgatgcaatccgcgctgtgaaacttcttactgctaaaatggctgacgctgttatcgaagttagcaaagtagaagaagaagcagaagttgaagcggtagaaactgaagaaacatctgtataagaacacaaaggggtgataaaggggaactctaacccctttatcacctttttttaacccaaaagggtatgattacatatcataattcaaggaggaattactaatggcagtaacagctcaaatggtaaaagaattgcgtgcacaaacaggcgcaggaatgatggattgcaaaaaagcactaactgaaaacgatggtgacatggacaaggcaattgactggcttcgtgagaaaggtatctcgaaagcagcgaaaaaagctgaccgcgtagcagcagaaggtcttgcaacgatcgctgttgaaggaaacaaagcagtaattgctgaaattaactctgaaactgacttcgttgcaaagaacgagagctttacttctttaatcaacgaaatctctcaacacctccttaaagcaaaccctgagtctgtagatgcagctcttgaaagcaaaatggaaaacggacaaacagtgactgaatatttgaatgataaaatcgcaaaaattggagagaaaatttctcttcgtcgcttccaaatcgttgaaaaaactgatgcagacgcatttggcgcttaccttcatatgggtggacgcatcggtgtactaacacttcttgaaggcacgactgatgaagaagtagcgaaagacgtagcaatgcacacagcggcagttaaccctcgtttcgtatctcgcgatgctgttccagctgaagaagttgagcgtgagcgcgaagttcttaagcaacaggctcttaacgaaggtaagcctgagaaaattgttgagaaaatggtagaaggccgtatcaacaaattcttcgaagaaatttctctagtagatcagccgtttgttaaagacactgatcaaaaagtaggaaagtatgtagagtctaaaggcgctactgtaaaaggattcatccgctacgaagttggcgaaggcatggagaaacgtgaagataacttcgctgaagaagttatgtctcaagtgaagaagtaaaacaatgatagggaacacgctgtgttccctatttttcaagaacaaatactgataaacatgctggagggttaaaatgagcggagccaagtatgaacgcgttgtgttaaaattaagcggagaagcattgtccggtggagaaggtcagggaatatctccttcaatcgttcagtctatcgcatcacaggtgaaggaaattcatgaaatgggtgtagaagttgctgttgttgtaggcggtggaaacatctggcgtggaaaagtaggcagtgaaatgggaatggatcgtacgactgctgattatatggggatgcttgctactgtaatgaattcacttgcaatgcaggatagccttgaaagcattggagttgaaacgcgtgttcaaacttcaattgaaatgagacaggtagctgagccgtacatccgtcgtaaagccattcgtcaccttgaaaaaaaacgcgttgtcatttttgcagcaggtactggtaacccatacttctcgacagatacgactgcagcattgcgtgcggcagaaattgaagcagatgttattttaatggcgaaaaacaacgtagacggcgtttatacagccgatccaacagttgacgcaactgcgaagaagtatgacactctttcttacctcgatgtactcaaggaaggtttagctgtaatggactccacagcttcttcactttgcatggacaacgatataccacttgttgtcttctctatcatggaagaaggtaatattaagcgcgccatttgtggcgaagaaattggaacagtagtaaaggggagaaattaagatgacgaaagaaatcttgaaaaacgctgaagaacgtatgcaaaatggaatttcaagcttaaagcgtgagctagcgacactacgagcaggaagagcaaatgcttctctacttgataaagttcaagtggactactacggtgctccaacacctgttaaccaacttgctggtgtttcagttccagaagcgcgtatgctattgatccaaccttacgacaaaactgcgattggcgatattgaaaaagccattcttaaatctgatcttggtctaacaccttctaatgatggaaatgtcattcgtcttacaatcccagcacttacggaagagcgtcgtaaagatcttgttaaactcgttaagaaatatgctgaagaaggcaaagttgttatccgtaacattcgccgcgatgcaaatgatgagttaaagaaacaagaaaaagatggcgacattacagaagatgaacttcgccgtggaaacgacgatgtgcagaagcttactgacaaatatgtagctgaagctgacagcattgctgctgataaagaaaaagaaatcatggaagtctaaatcaataacatgtaaaataagataataaaaggaccctcttttcccacagggggtttttttgttaagtaagtgacacaatggaggatttgcaatgcttgggaagttctcgaactggatgagaaagaatgaagatgaggaacaattagaaattaacacatctgctaatatcccagggcatattgcgatcattatggatggcaatggacgctgggccaagaagcgaggtctcccacgtgtggctggccaccgtgaaggtgtgaaggtagtgaagaagatcgttcggaaggcaaatgatctaggcgttcaatatttgacgctctatgccttttcaactgaaaattggaaacgaccgaaagaggaagtagactttttgatgaagctcccagaacaatttctacttagccacctgccagaattaattgagcagaatgttcaagtacgaattatgggagaacgagagcagctgcccccccatacgttcaaagccattagcaaggcagtagaagaaacgaaagataataccggacttattcttaatttcgcactaaactacggcagtcgtcatgaaatgaagacggccatgcagcggttattaagtgatgtgaaaaaggggatactgacagaagaagagattacggaagagagaatttcttcctatttactcagtagtcaatatccggatccggatttgcttatacggacaagcggagaaatacgcttaagtaactttatgctctggcagctggcatacacagaactatggtttacagaagttctatggcctgattttacagagcaccattttgttgaagccgtacaggaatatcagcgaagaggaagacgttacggcggggtgtaagtgtaggaggacattaatgtaatgaaacaacgtgttataacgggtgtgatttttggcgccctcttgttaggaatgattgtaattggagactggccgttcattcttttgatggcgctagttgccacagttggaatggttgaactgttactgatgaagaaaatcacattagtttcacttcctggcttacttgctatcgtcggaacgtggattcttgtcatgcctgatgactggattgcttcactaacatcatctgtttttaccaaaattgatctcttattcttcggattgctcattctacttgcaatgacggttctgacgaaaaataagtatagttttgatgaaagctcttttattatgatggcatcgctctatgttggtttaggtttttattatttcacagcaacacgttatcttggtgaaagtaatttagacggcatgattcatttgttctttattatttttctcatatgggcatctgattctggagcctattttgtgggacgatcactcggtaagaaaaaactttggccacatatatctccaaacaaaaccgttgaaggtgcagttggtggcgttgtgatggccttaatcgtagggattgtttttcaactgatttatccggtatatgattccatggttgttgtcataatcgtatcggtgttaacatctgtttttggacagattggtgatcttgttgaatctgcgtttaagcgtcattatggagtgaaagattccggcagtatcttaccagggcacggagggatacttgatcgatttgatagtcttatattcgttctcccccttctgcatttacttaacctggtatagtcgaaacagagtggattggaggaacgaattttttgaagaaaattagtttacttggagcatctggctcgatcggtgttcagactctcgatatcataagaatgcatcctgatatgttttcccttgtcgcattttccgttggaaaaaatgttgaaaaagcggtagaaatagcggaagagtttaagccaaagttattgtctgtccaaaagaaagaagatgctgattcactcagaagaacgatttcaaggaaaacgaaaattgtttatggagatgaagggcttttagaagttgcttgccatcatgaatcaaccgttctcgttaacgcaattcttggaagtatcggcctttctccaactttatcagcgattgaacagggaaagacaattgcaattgcgaataaagaaacgctcgttacagcaggccatctcgtaacagaagctgcaaaaaaacatggatctgcccttttgccagtagatagtgaacattcagcactgtttcagtgtttgaatggtgaaaagcaggatcaaatggaacgacttattttaacggcttcaggcggtagtttccgagataagaaacgagaagagctaactggagttagcgttcacgatgctttaaatcacccaaactggtcgatgggagctaaaattacgatcgattcagcaacgatgatgaacaaaggactagaagtgattgaagcccattggttatttggaacgccatatgatcaaattgatgtcgtgcttcataaagaaagtatcattcactcaatggtagagtacatagacggaagcgtcatggcgcatctaggtactccggatatgcgaattccaattcaatatgcacttagctatcctgatcgacttgaaatcagaaatgcaaaacggttaaacttatgggaagttggtcaattacattttgaaaaagtggattacaaccgcttccgtgcattaaagctagcttatgacgctggccgtgctggtggttcacttccagccgtattaaatgcagcaaatgaaacggccgttgccgcatttcttgaggggaaaatcgatttcttaacgatcgaagagctcgtagaaaaagcgatggagaaacatgagatcattcaaaatgcgtcgcttgaagaaatacttgaagttgattctgaaacaagattacgagttcagtcattaattaaataaaggtggtaagtggatatgaacactgtgatttcgatcattatcatattcggagcactcgtttttttccatgaattgggtcacttgcttctcgcaaagcgtgcggggatcttgtgtcgagaattcgcaataggcttcggaccgaaaatcttcacatttaaaaaaggggagacggtttacacaatcaggctcctacctcttggtggatttgtccgaatggccggagaagatcctgaaatgattgagttaaaaccaggtcagcgtgttggtcttcttttcaatgatcaaaacaaagtgtcaaagattgtgattaaccaaaagtcagcttatcctaatttaaaagaagtaacggtggaagaagctgatcttgagcgtggcctttttattaaaggctatgaaggtgaagatgaacccgctgttgtctatccgattgatgagacgtctcattatgtgatggacggttcagaattccaaattgcgccatacgatcgtcaattcggatcaaaatcgctttgggatcgtttcctggctatttttgctgggccggtaatgaatttcttgttagcgatcgtgatttttattgcactcggtttattacagggtacgccgacgaatcaagtgaaagaagtcgttgatggaagtcctgctgaacaagcaggtatgatgaacggtgacgtgattactgaaatcaatggaaccgaaataacgggatggaatcaaatgacctcgattatccaagaaaatgccaataaccaacttggctttaatgtggatcgtgaaggagagaatgtttccctatcgattactcctgaaaaacaggagctctcagaaaaccagtcggttggtcgaattggtgttgcacctgaatatcaggtaaatttcttggattccattgtctttggatttacttcaacctatgaatttggtaaggcgatctttgtaggtcttggacaacttgttacaggccaactttcgatcgatgccttctctggaccagtaggtatttatagttatacggaagaagcagcatcaggtggtctttatgtcctaatgagatgggctggcttcttaagcattaatctcgggatctttaatttattgccgcttccggcacttgatggcggtagacttctcttcattggtgttgaagcattacgaggaaaaccaatcgatccccaaaaggaaagccttgttcactttattggcttttcgttcctcatgttgcttatgttagttgtaacatggaatgatatccagcgcttcttcttataagagcgacaggacccgttttaagaatgaaatgaggtgcaggagatgaaacaatcaaaatactttaatccaacccttcgtgacaatccagctgatgcagaaattaaaagtcatcagctccttgtccgagcgggttttatgcgtcaaaatgcgtcaggtatttattcataccttccattaggcaaaaaagtattaatgaaaatcgaagaagtaattcgtaaagagctcgatggagttggggcgcaggagctcttaatgccagcgattcagccagctgaattgtggcaggaaacaggtcgatgggatgtttatggacctgaattaatgcgattaaaagatcgtcacggacgaccattcgcacttggggcaacgcatgaagaattaattacgagtcttgttcgagatgagctaaaatcgtacaagcagttgcctgttacgttatatcagattcaaacaaagtatcgcgatgagcgtcgtcctcgctttggattgctgcgtggcagagaatttattatgaaagatgcttactctttccattcttctgatgagcagcttgatgaggcatatcagatgatgcatagcgcgtatagccgtatcttcacaacacttggtttaaacttccgtccagttgtggccgattctggagcaatgggtggaaaagatacagaagaatttatggcactttctagcgttggagaagatacgattgcatacagcgactcctcggattatgctgctaatattgagatggcagaggtccacgttacttatcagaaaccagatgaggcagaagcttctttaactgaaggagaaggtgaagcttcagcagatcgccaaattcatgcaaccctacttaaagtacaagaggaaacaattcttgttctagtaagaggcgatcatcaattaaatgacattaaggtgaaaaacctttttggcaccgatatggtggaagtaataaacgaagaagtagatgtgaaaacatttagtggaaagattatggccgatcatggcgttagttcgattgtaaatggctctttaactggtaagcatgcttaccaaaatgtgaatccggagcgtgaccttgatatcgaacgttatgaagaccttcgctttattcaagaaggagatccatctcctgatgggaacggtacgattgtatttgcagaaggcattgaaattggacaggtatttaaacttggtacaaaatatagtgaaacaatgggcgcgtcttaccttgacgaaggtggaaaagcgaaaccgatgatcatgggctgttacggcatcggagtctcaagaacgctcgcagctattgctgaacaaaatgcagatgacaatggacttagatggccactagctgtgaccccgtttgatgttcatttgattacgattaatgtgaaagatgatgagcagacagctttatctgatcgtctttatggtacgttgcgtgaagagcgctacgatgttctttacgacgatcgcaaagagcgtgcgggcgttaagtttaaagatgccgacctcatcggacttccgataagagtgatcgtaggtaagaaagctaatgaaaagatagtcgaagtaaagcgaagagatactggtgagtcgatggaagttccagttaatgacttgaacaagacaatccagcagcttttaacacaaatgaactaaaaatgtggataggtgccattggtaccttccaccttttttttcgctacctcttcgcattttaagaaggaggaagaattgaatggaccaggatttaaacatacggaaagaacgtctccagctgctccttcaacaaatatcggttccagaaaaattcgttgactacttcaaggatgggtacatttcaaagttaacggtctataaagaaacgaggaagtggcattttgactttcactttccagacgttcttccttttcatgtatacgagctatttcgcagtcgtttgcaggatggattaaagcacattgccgaagtgacctatagcattgctacggactcaggaggaaatgaagaacttgccatggcttactgggaaaacgttgcggaactaatgcaggatcattctgcgtccttaaccaacgttttaaaaaagcagactccgaaaattagtggcaataagctaatcgttacggtacgaaatgaaacagaagcagcgattgctagaagaaaattagcagcaccgctagctgactgttacacaaatgccggctttccgaaatacatgcttgaagtagaagtgaaagcttctgagcaggattaccagaagtttgttgaacaaaagcaacaagaagatcaatccaaaatgatggaagctttgattgaaaaagaaaaagcagataaatcttcaagcaagaacgtgccggattcacttgtcattgggtacaaaattaaagaagatcccgtgccaatcgaaacgattcaggatgaagaacgtcgtatcgctgttcaaggttatgttttccacgccgaaacgaaggaacttagaagtggtcgaacattattaacctttaaaataacggattatacggattcaattctagttaaaatgttctctcgtgataaagaagatgtgccgattttagaagctgttcgaaaaggcatctgggtgaaggttcgcggtggcattcaaaatgatacgttcgttcgtgatcttgtcatgattgggaatgatttaacggaaatcaaacctgacttgcgacaggacgaggcacctgaagatgagaaacgaattgaactgcatgcgcatacgcaaatgagtcaaatggatgcggttagtacagctggagggttgatctctcaggcagctaaatggggacatccagcgattgcaattacagatcataatgttgttcaatcatttcctgatgcttacgctgctggtcaaaagcatggcgttaaagttatttatggtcttgaagctgatcttgtcgatgatggtgtcccgatggcgtacaatgaagcagatcgagatcttgaaacaggtacttacatcgtttttgacgttgaaacgaccgggctgtccgctgtttacaacaaaatcatcgaactggcagctgtaaaactaaaagatggtgaaattgttgacaaatttgagcgatttgcaaatccgcatcatccgctttcttcaacaacaattgaactaacgggtattaccgacgatatggtgacgaatgcacctgagattgaagatgtgatcaaagattttcatgaattcatgggagatgatattctcgttgcccataatgctagctttgatatggggttcttaaatgttgggttacgtaatgccggtttaggcgaagcgactaacccggttatcgatacgctcgaattggctcgttttctttatcctgaaatgcgtaatcaccgattaaacacgctatgtaaaaagtttgatattgatcttactcaacatcaccgagcgatttatgatgcggaagctacaggatatttattatggaagctagtgaaggatgctctcgagcgtgagataacgaatcacaatatgctaaatgacaatatgggccaaaccggttttcagcgtacccgtccgtctcataccattattttggcgaaaaatgatgttgggttaaagaacttatttaagcttgtttcgctatcgcatatcgattatttttatcgaagcgctcggataccgcgttctaagctggagaagtaccgagaaggcctgcttattggttctggatgtgataaaggggaagtattcgaagggatgatgcaaaagtctcctgaagaagttgaggacatagcgaagttctatgattacctcgaagttcagcctcctcaaaattatatgcatttaattgagaaagaacttgttcaagatgaaatggctttaagagagattatcggtaaaattgtaaagcttggtgagaaattgaataaacccgtcgtagcgactgggaatgtacactatcttgagccagaagatcatatttaccgaaagattttaattaaagcccaggcgggtaacccgttaaatcgtcaaacgcttccgcaagttcactttagaacgacgaacgaaatgctcgattgcttccatttccttggtgcagaaaaagcgaaggagatcgtcgttcagaagccacaagtagtggctgatttaatcgatgacattaaaccgataaaagacgatcttttcacacctcgaattgaaggtgctgatgaagaaatgcgtcaaatgagctacggtatggctagaagtatatatggcgatgagcttcctactattgttgaagaaagacttgaaaaagagctaaagagtattatcggtcacgggtttgctgttatctatcttatttctcataagcttgtaaaaaagtcgttaaacgacggctatctagtaggatctcgtggttcagtagggtcctcttttgtggcgaccatgacagaaattacggaagttaacccattgccgccgcattacgtctgtccttcttgtaagaaatcgcagttctttgatgatgggtcagtaggatcagggttcgatcttcctgataaaaactgtgaagattgtaatattcctcttacaaaagatggtcacgacattccctttgaaacgttccttgggtttaaaggcgataaggtacccgatattgatttgaacttctcaggtgaatatcagcctcgtgctcataactacacgaaggaactgttcggggaagacaatgtgtttcgtgcaggaacaattggtactgttgctgagaaaacggcgtatggctatgtaaagggatatatgggtgatcatgatcttcactatcgaggagctgagattgatcgtctcgtatcagggtgtacaggcgtgaaacggacttcagggcagcacccgggtggaattatcgttgtgccagactatatggatatttatgatttttcaccaattcaattcccagcagatgataaaacgtccgcatggaaaacaacgcattttgatttccattccattcatgataatcttctgaagcttgatatccttggacacgatgatccgacggttattcgcatgcttcaagatttaagtggcattgatccgaaaacaataccgactgatgatgcagaagttatgaagctctttagcggaaccgagtctcttggcgttacacaagatcagattatgtgtaaaacaggaacttacggtattccggaattcggaacacgttttgttcgtcaaatgcttgaggatacgaaaccaagcactttctctgaacttgttcagatctcaggtctatcgcatggtaccgatgtatggttaggaaatgcgcaagagctcatccaagctgggacatgtaacttaagtgaagtaattggttgtcgtgatgatattatggtttacttgatttataaaggtcttgatccgtcgcttgcgtttaaaatcatggagttcgtacgaaaagggaaaggacttcaggaagaatgggtagcggaaatgaagaagcatgatgttcctgactggtacattgattcttgtttgaaaatcaagtatatgttcccgaaagctcacgcagctgcgtatgtattaatggctgttcggattgcttatttcaaagtgcatcatccgattcttttctatgctgcttatctaacggtaagggcagatgattttgatatcgatacaatggcaaaaggatcgaatgcaattcgagcgaaaatcgaagagattaacgaaaagggacttgatgcatcaccaaaagagaaaaacctcttaacagtgatggagattgcgctcgaaatgtcagagcgcggtcttcgtatgcagaaggttgacctttaccgatcaaaagctgctgaatttgtcgttgacggggattcgctcatccctccgttcaattctctaccgggcgttggaacgaatgctgcaatcaatattgaaaacgccaaagaagccggtgagtttctttctaaagaagatttacagcagcgaagcaagatttcgaagacagtgctagaatatctagatgatcatggatgtcttgaaggacttccagatgctaaccagcttagcttattctaaagaggagccttcgcttctctgttgaattggttatatgagtatggtatagtaattgtggaaatactagtgaatacacacgcgacggaagagtggggctatcccactctttcgttttcgattgggaccctgctgtacaggatcagaaaggaggacaaccaatgaatgaaaatgtgattacggttactgaagaactagtaaaaccaatagtagatgaaatgaacctggaacttgtagacatagaattcacgcaggaaggcaagaattggtttctccgtgtctatgtcgattctcctcgaggtgttgatattgaggagtgcgggacaattagcgaaaagctaagtgaacagctagataaacatgatccaattacacaaccttatttcctcgaagtttcttctccgggggcagagcgtccgctgaagaaaaagactgatttcgagaaagcggttggaaaacaagtctatatgacaacttacgaaccaatagatggagagaaaagctttgaaggtaagctttctgattttgatggtgaaacggttgtgattgaacagcgagtgaaaacgagaattaaaaaggtagaattaccttatgaaaaagtagcaagcgcaaggcttgcggttgttttttaattaaaggggagaatgaaaatgaagagtagtgagttattagatgcgctaaccattcttgaaaaagaaaaaggcatcagcaaggatattatcgttgaggcgattgaagcagcgcttatttcggcgtacaagcgaaacttccatcaggcacaaaatgtaagagtcgattttaatcaggacactggttcgatccgagtatttgctcgaaaagatgtcgtagaagaagtggaagattctcgtcttgagatctcactcgaagatgcgaaagacattgatcgtcaatatgaattagaagatatcgtggaaatcgaagtaacgcctcgtaatttcggtcgtatcgcagctcaaacagcgaaacaagttgttactcaacgtgtccgtgaagcagaacgtgggatcatatttagcgaatttattgaacgcgaagacgatatcatgaccggaattgttcagcgtcaagatcatcgttttatttatgttgacctcggtcgaatcgaagcacttctccctgcaggtgaacaaatgccgaatgaaacgtatcattctcatgatcgtattaaggtatatgtgacgaaagttgaaaaaacaaccaaagggccacaggtgatggtttcaagaactcatcctggtcttcttaagcgtttatttgaacttgaagtgccagaaatttttgacggcacagtagaagtgaagtcaatttcacgtgaagccggcgatcgatcaaaaattgccgttcatgcggaagatcctgaagtggatccagttggctcttgtgtaggtcaacgcggtcaacgagttcaggcaatcgtaaatgagcttaaaggcgagaaaatcgatattgtcagctggtcggaggatatcgtggaatatgtagcaaatgctcttagtccttcaaaagtacttaaagtaaatgtagatgaagaaaacaaaatgactcaggttatcgtaccagactatcagctctcgcttgcgatcgggaagcgcggtcaaaacgcccgtctagcagcaaagctgacaggatggaaaattgatattaagagtcaatctgaagcagaagagctcggcatctatagtgctgacgaagctcctctttttgaggaaaatgacgctgaagattcagacctagattaagcaagatcgggagaggtgtccatcgtgcaaaaacgtaaaattccgatgagaaaatgtgtcgcctgtcaagaaatgaagccaaaaaaagagctcgttcgaattgttcgttcgcctgaaggggttatatctatcgaccaaacgggtaaaaagaatggacgaggggcatacctttgcaacaaagaagagtgttttactcttgctaaaaagcgaaattctttagcggctcatctaaaagcagaagtgacggaagacatttatgctgacctcgcagaatcgcggtcaaactaaatgaacaacaagaattgggagtcacttctaggacttgctcagcgtgctggcaaagttgtgtctggagaagaacttgtggtgaaggaaattcagcgcaagagtgccagactcgttttaatagcgaatgacgcatctgacaacacgagaaagaaaattacggataaagcaactacttataaagtcccagtatgttttgttacagggcgctatgaacttggtcatgcaattggcaaagttcaacgagtcacgatagccgttactgatgcagggtttgcgaagaaacttcacgcgatgctcgatcaataactcgggggtgatcgtatgagtaagatgcgaattcatgagtatgcaaaagaacataatactactagtaaggatgttatcgaaaagttaacaagcatgaatattacggtaaaaaatcatatgtctgtgattgatgatcaggcgatggctaagcttaataacgattcgaaacaatccaaaaagggaagcgacaaaaacagtatggaaaataaaaacaatcgaaacaacccaaaagcaaatgcaaatcaaaagaatagcaaaagcgcgccaaatcgtcgcggtggacgtcgtccaaaccgccgtgggaaaggacaacctcctaaaaacacggctgctccaagaagactgccttctaaagtaacctttattggttcacttacagttggccaacttgctgaaaagctaggtaaagatgcttctgaattaattaaaaagctaatgggtctaggtgtaatggctacaattaaccaggaactagacaaagatactatggagctcatttgtgatgattacggtgttaaagttgaagaagaagagctgttcgaagtaacagatcttgataattacacaagtgaagacgaagaaggtaagcttgttgagcgtcctgcagttgtgacgatcatgggtcacgttgaccacggtaaaacaacgctacttgacggaattcgcgatacaaaagtaacgcagggtgaagctggcggtattacacagcacatcggggcttatcaaattgaagaaaacaataagaaaattacgttccttgatactcctggacacgcagcatttactacaatgcgcgcacgtggagcaaaagtaacggatatcacggttcttgttgttgcagcggatgacggcgttatgccacaaacggttgaagccattaaccatgcaaaagcagcagaagtgccaattatcgttgcagttaataagatggataaagaaggagcaaatcctgatcgcgttatgcaggaactaactgagtatgaacttgtttctgaagcatggggtggcgatacaattttcgtgaacctttctgctattaagcgtgaaggaattgacaatcttcttgagacgatcctcttgatctcagaagtagaagagtttaaagcaaaccctaataagcttgctacaggtacagtaattgaagcgcagctagataaagggcgcggaccagttgctacacttcttgttcaagaaggtacgctaaaagttggtgatcctgtcgtagttggtaacacgtttggtcgtgttcgtgcgatggtcaacgatcttggtaagcgtgtcgaaacagctgcaccttctacgcctgtcgaagtgactggtttgagtgacgttccaaatgcgggagatcgctttgtggcatttgaagacgagaaaacagcacgtcaagttggggaagcgcgtaatcagcagcaaattgaagctcagcgtaaagaatcttcaaaaatgaatttggatgatttatttgaaaagattcagcaaggcgatgtgaaagatatcaatgttatcgtgaaagctgatgtacagggttctgttgaggcacttgctggctcacttcagaagattgaagtagaaggtgtgaagatcaacattattcatacagctgttggtgcgattacagaatcagatataattcttgcttctgcttctaatgcgatcattatcggatttaacgtacgtcctgattcaaatgcgaagaaagtcgctgattctgagcaagtagaaattcgcttgcatcgcgttatctatacagcgattgaagaaatcgaatcggcaatgaaaggaatgcttgatccagtttatgaagaaaaagtaattggtcaagctgaagtacgtgaaacgtttaaagtttctaaagtaggtacaattgcaggatcttacgtaacagaaggtaaaatcacacgtaattctggcgttcgtgttatccgtgacggaattgtcgtattcgaaggtgaagtagatacactgaaacgcttcaaagacgatgcgaaagaagtggcaaaaggatacgaatgtggtattactcttgcaaagttcaatgatgtaaaagaaggcgacattattgaagcctatatcatggaggaagtaaagcctaagtgattggatacgtcgaatgtgaatgcatcatttacgatgcgcaatctttgaaggaaaaaagagctgtgcttcagtcggtgataagccgactgaagcacaataatcttgcaatttctgagcttgatagccaggatctttggcaacatactgtgatcggtattgtcacaacggcttcaagcaaaacggcctgtgagcgtgagcttcagcgtgccatttcattgattgactcacgtcctgatatcgaactcactcgagcaacttatgagtggctttaggaaagaaacgaggtgtaacgatgagtaatgttcgcgcaaatcgtgttggtgaacagatgaagaaagaacttggtgatataatcagcaggaagattaaagacccgcgcgtaggtttcgttacagtaacagcagtcgaagttacgaatgatctacagcaagcaacggtatttattactgtccttggtgacgaagagaagaaagaagcaaccctgaacggccttgcaaaagcaacaggatttatccgttctgagatagggaaacgcatccgtcttcgtaaaacaccggagatttactttgaatttgatgaatcgatcgattatggtaacaaaatcgaacgacttcttgcagatttaaatcaagcggatgagtagtgacgaagggataggcaggaatgtctatcctttctctatgtcatcagattgaaaggaggaagagcatgaacggcgtattacctttaaaaaaaccggctgggatgacctctcatgactgtgttgccataactagaaagttattacacaccaaaaaagtggggcatacgggaacgttagatcctgatgtgacgggcgtattgcctttatgcattggaagagcaacaaaagttgcacaatatatgactgacttctcgaaaacgtatgaagccgttattacacttgggttttcaacgacgacagaagatgcatctgggaataaggtggatgaaaagaacgtagagaaaatcccatcaattcacgaaatcgaagaagctcttgcaaagtttagagggaggattgagcaagttcctccgatgtattcagctgttaaaataaacggaaaaaaattatatgagtatgcatttaagggagaggtcgttgagcggccgtctcggaaggtcaccattcatgagcttgaacgaattggtgaggtaacaaaagacgatggaactgtttcaatccctgtacgtgtcacttgcagtaaggggacttacattcgaacgcttgcggtcgacataggggagcatcttgggtatccagctcatatgtcatttttaattcgaaccgcttctggcccatttaaactagaagaatgtttgacatttgatgagattaaacagatgatagaagatgaaacgctctctcttttcccgatggaatatgctctttctgccatgccatctttaacagtcgaacctgaacttgaagcaaaacttcaaaatggagctgtacttcctcaggtggatgagatgacagaagatcgactcgttatgtacaataaggacggagaagcaattgcaatctatcaaaaacatcctgagaaacctggcttaatgaagcctgagaaagtgttttcgagatgaagttagaaggtgaaaccgttgaagacaatttatttatcgcatccacatcaattgaaggcggaacatcctgcggtcatggcgcttggatattttgatggcattcaccgtggtcatcagaaagtgatttcgacggcaaaaaagatcgctgatgagaaaggtgtagagtcagcagttatgactttctatcctcatccatcagtcgttttagggaaatccaccccgcaaaccaaagccattactcccctcgatgataaaattgatctaattgaaggaatggggattgacgttctttatatcgtgaagttcgaccaaacgattgcgggcataacgccacaacaatttgtagacgactatattattgctttatctgttgtacacgttgtcgcagggtttgattatacatatggaagtaaagggagaggcacgatggattcgcttcctttccatgcgcgaaatcagtttgatcaaaccgttattgataaagtttcacagcaagatgaaaaagttagctcaaccctcattcggtcatatatacgtgatggagcggtagagaacgttgaagaggttcttggtcgccgttatgtggttaaaggaacggttgtaaagggagaccagcgtggtcgtacaataggttttccaacagcaaatgttgacctaaaggacgattatcttgttcctgatacaggcgtttacgcagttcggatgcgggcgaaagaagagtggatgaacggtgtatgtaacgtcgggtataaaccaacgttttatgaagaaaagccagatcagccttctctagaagtgcacgtatttgattttagtggtgacttatatggccagcaggtagaggtggaattttacgagaagattcgcggtgaagtgaaattctcatccgtagatgacttgattgctcaaattggtcaggatgcgaaagacgcaaagaaaatcttgaaatagatttcccttgcattttagaacgaaaacctgtaatctattatctgtacgacaagtacacaacctatactgggcaatcgagtcaccgacgtttgcgcggtatcaggggattagaaattaaggaggtgaaacggatggcaatcacacaagagcgtaagcaagagcttatcactaagttcaaaactcacgagaatgatactggttctccagaggttcaaatcgctgtccttactgaggaaatcaacaatttgaacgatcatctacgtttccacaagaaagaccaccactctcgtcgcggtcttctaaagatggttggtaaacgccgtaatcttttaacgtatcttcgtaacaaagacgttactcgttaccgcgaacttatcaaagaacttggtctacgtcgataatgattcagaaaagcgggatatttcccgcttttttattaggttaaaaatacatagatttcttcctttctttttagaagtaaaaaggttagggtataataaaagaaatgattttattggatgagaggagttctcacattaatggcacaagagaagcaagtgttttcaattgattgggctggtcgcgaattgtcagttgagattggtcagctggcgaagcaggcgagcggtgcagcattgattcgctacggcgatacggctgtactagcaacggttacaggttctaaggagccgaaagaccttccgtttttcccactaacggttaattatgaagaacgattatatgcagtaggtaaaattcctggaggcttcatcaagcgtgaaggccgtccaagtgaaaaggcaattcttgcgagtcgtttaattgaccgcccgattcgtcctttattcccagatggtttccgtaatgaagttcaagtagtgagcacagttatgagcgtggatcagaactgttcttccgagatggcagcaatgttcggttcatctctagcacttggaattagtgatcttccatttgatggtccgattgcaggcgttctcgttggacgcatcgacggtaagttcgtcgtaaatcctaatgttgaacagcttgaacaaagtgacattcatttaacagttgcaggtacgaaagatgcgatcaatatggttgaagctggcgctgaagaagtaccagaagaaacgatgctggaaggtattctattcggacatcaggaaattaagcgtctaatttctttccaggaacaaatcattgaagctgtaggaaaagaaaaacgtgaagtagtgctgaaaaaagcagacgaaacgcttgaagctaagcttagtgaggaatacctcactgatattcaagaagctgtaaaagtgattgaaaagcatgcaagacaagaagcgatcgatgctgttatgacgcgtgcaacggaagcctatgaagaaagtgaagaatatagcgctgaagaagtaaaatcaattttgaatagctttgtgaagcaagaagttcgtcgcttaattttgaaagataaagtaagaccagacggacgtggcgttgatgaaattcgcccacttgattccgaagtaggcatcctttcaagaacacacggctcaggattgttcactcgtggacaaactcaagcacttagtatttgtacactaggcgcactcggagacgttcaaattcttgacggtcttggtacagaagaatcgaagcgattcatgcaccactataacttccctaaattcagcgttggtgaaacaggcccaatgcgtggaccaggtcgtcgtgaaattggtcacggtgctctcggtgagcgtgctcttgagcaagttatcccaacagaaaaagatttcccttacacaattcgtcttgtatctgaagtgcttgaatcaaacggttcaacttcacaggcaagcatctgtgcaagtacgcttgcgatgatggatgctggcgtcccaattaaagcaccagttgctggtattgcaatgggacttgttagtgatggagaagatgtaacagtacttacagatatccaggggatggaagatgcacttggtgacatggactttaaagttgctggaacagagcaaggtgtaacggcgcttcaaatggatatcaaaatttcaggaattaatgaagacatccttcgccaagcgcttgaacaggctaaaaaaggtcgtcttgcgattcttgaaaacatgatgagtgcaatcaacgaacctcgtacagagctttctgcgtatgcaccgaagatcttgacaatgtcaattaaaccagataagatccgtgacgtaattggaccaagcggtaaaatcatcaataaaattattgaagaaactggcgtgaaaattgatattgagcaggacggttcaatctttatttcttctacagagcaagaaatgaacgcaaaagcgaagaagatcatcgaagatcttgttagagaagttgaagttggcacaacttaccttggtaaagtgaaacgagtagagaaatttggggcattcgttgagctatttgctgggaaagaaggccttgttcatatttctgaacttgctgaagagcgtacaaacaaagtagaagatgttgtctcgatcggtgatgaaattatggttaaagtaaaagaaatcgataagcagggacgcgtcaatttatcacgcaaagagatcttaaaagaacagcgtgaacgtgaagaacaaagtcaaaagagttaaggaattcggctgaggccggattctttttttgctttcaggaattgatgctgaatcgttggctaatttccatcttgcataaaccctagttctagagcttgccccatcaacatacttttttacaaaagggggcagatgaatgaagaaatcctgggttcaattcattgtgtttattatgatcttaggcgtagcagcaggttcacttcagaacccctacacatcgatgtatttaactgatttaaaagagcaagcggcaataagtgtcaacggaagtccgttatataatgaaatcttacaagcaaaggaacgaatggatattccgcctgcgaatgcgatagttgatcgtgtatggaaaggcattcctgggtataatggaatcgtcgttgatgcagaacagtcttatgcgaaaatgaaaggaaagacctttgatgaagagatgctggtaagaaaagaagtcgagcctgatattcagttagatgatctagaacctactgccgtgtacaaaggaaatccgaataagccaatggccgcttttatgattaacgtggcatggggggaagagtatttacctgacatgctacaacagttaaaaaagtataacgtgcacgcaaccttttttctcgatggctcctgggcaaagaaaaaccctgatatggtacgcatgattgatgaagaagggcatgaaattgggaaccatgcttattctcatcctgacttaaaacagttaagcgatgcggccattcggaaagagcttgaagatacaaatcaagtgattgaagcaactcttgataaaaagcccgttgtttttgcccctccaagtggaagttatgcaaacaatgctgtaaagattgccgatgaacttgggatgcaaacggtgttatggtcagttgatacagttgattggaaaaagcctacgccacaatccttaacagcaaaggtgttacaaaatgtgcacgcaggagcgcttattttgatgcatccgactgaaccaacagagaaaagtctagaagcactaattcggggagttgaaaaaagaggctatcagttaggaacagtctcacaagtgttagattcgaagcgggtggagaaaaggtgatagaattgtgtcaattctacattaatgatatagtgattttggagtgttacgaaacataatggttcgatacaggaggaacaagcttgataaataaagtaacttgcaaaaacggtgtaagagttgtgttagaaaatattccaacagttcgatcggttgcgatcgggatatggattggaaccggatctcgttttgaacctaaagagttaaacggcgtctcgcattttcttgaacatatgttttttaaggggacagagaagcatagcgcaaaagaaatcgctgaagcatttgatagcattggcggtcaagttaatgcgtttacatccaaagagtatacgtgttactacgcaaaagttcttgatgagcatgcagattatgcgcttgatgtgttaacggatatgtttttccagtcaacgtttgaagcgggcgagcttgcgaaagagaagaacgttgtgcatgaagaaatcaaaatgtacgaagatacgccagatgatattgttcatgatatgctcagtcaagcaagctatggtgatcatgagcttgctatgccaattctcgggacagaagaaacgttaaaagatttttctggagatacgcttcgtgagtacatgcaaacacactatacacctgacaacatcgtcgtatccattgctgggaatatagacgaatcctttatgcaaaaagttgaagcggcttttgagcattgggaaacgcctgcaggaaaacctgaagtacaggcgccaatctttcattcgggccaaatcgctcgccaaaaagaaacagagcaagctcacttatgcctaggatatgctgggttgccgtttggcacagatgatatctatagtttaatcgtcatgaacaatgtgcttggtgggagcatgagcagtcgtctcttccaggatgttcgggaggatcagggtcttgcttactcggtgttctcgtaccattctgcttatcaagatagtggcttattaacaatctatgctggaacggctcaaaaccagcttgatcgtctatatgaaacgattcagaaaacacttcaggattttaaacgtgatggaatcacttcaaaagagttaaagaactgtaaagagcagctaaaaggaaacttaatgcttagtcttgaaagcacaaatagccgaatgagtcggaacggtaaaaatgaattgttgttaaaccagcatcgctcactcgatgatattattacaaatatcgaaagcgttaatcatgagaaagtaaacgatatgattcaatccatgtttacagatgaattttcatgttcactcattagccctaacggcaagttgccaagcagcatgaaatcataagagagatcccgcctgaataaggcgggttttttcatgtcttccgagaaagactctttcatagactaagattatcaaccagtgtagaagggggacgttattatgagattaagtcaacttagtgggaaagagcttattgatattgaaaaaggacgtaagctcggtgtgttgggacagacggatctcctatttgatgaaaagacaggattattgaaagaattaatcattccaaaatcttcatggatggggctgaaacggaaggaccaggagatctcaataccgtgggatcatattgaaacaattgggagagatatgattattttgcaaaataatcagaaggaataaaactggtactcttatcgattcaccaagcgggcatacaccacatagaatgttgagaaattacaataatccccgtagtaagacgtggaaaaggaaaggggaggaacgatgctaacgaatcaacatatcgctgtcattggcggtgatgcccgccagcttgaaattattcggaagctgactgaattaaatgcggatctgtatttaatcggcttcgaccagcttgatcacggatttaccggtgcaaccaaatgtacgttagatgaagttaagctaaatacccttgatgcaattgtccttccagtgagtggaactacgatcgaaggagaagtcgacactattttctctaatgaaaaagtcgtattaacagctgatcagttaaaacaaaccccagaacactgtacgatttatagcgggattagcaacagttgtttagataaaatggtcactgaagcatcaagaactttaattcgcttatttgaacgagacgatgttgccatttataattccattccgacagttgaaggaacggtaatgatggtaattcaacatacggatattacaattcatcaatccaacatcgctgtacttggccttggacgtgtaggaatgtctgttgcgagaactttcgatgcacttggagcgaatgttagcgtaggggcaagaaagccggagcatattgcacgcattacagagatggggttaaagccatttcatttatctgatctaccgaaccaagtatcaaatttagatgtgtgtatcaacacaattccggttcaaatcgttacgtcacaagtaatcgcaaaaatgccaggccatacgctcgtcatcgatcttgcttcaaaaccaggtggcacagattttcgctatgctgaaaagcgaggaattaaagctcttcttgcgccaggacttcctggaatcgtagccccaaaaaccgctgggaaaattatcgcaaatgttctgacacagttattaattgagcggtctcagaatggaaaggagaactcgccatgagtttgaaaggaaaacacattgggtttggtttaacaggttcacattgtacgtatgatgcggttgttcctcaaatcgaagaacttgttcaattaggtgcgaaggtaactccgtttgtctcccatacggttatgaatacaaacacgcgctttggggaaggggaaaactggatcgctcgtattgaggaaataacaggtaatgaagcagttaattcaatcgtaaaggccgagccgtttggtcccaaaacaccacttgactgcatggtgatcgctccaataacagggaactccattagtaaatttgcgaatgcgatgactgaatctccagtattgatgggggcaaaagcgactttacgtaatgaaaaaccagttgtgttaggtatttccaccaacgacggacttggactaaacggtacgaatattttaaggctgatgtccacaaaaaacatttattttatcccatttggccaggacgatccggtgaaaaaaccaaactcgttagtcgctcgtatgccttcgttaagagaaaccgtggaaaaagcccttctcggcagacagcttcagccagttctaatcgaaaggtatttggattaaccaattgatttatctttctttagaataggtttatgatagaatagagaataaaatcactaagaatggggagaaacctcggtttctccttctgttgtgatggattttgaatggaatatgggaggagaataagtcatgagcgggaaaaaatatcatgtagcagtagttggagcaacaggggcagtcggacaacaaatgatcaaaacactagaggaacgagactttccgatatcgaccttaacgctcctttcatcatcgcgttcagctggtaagaaagttaccttcaaaggacaggagttaactgtagaggaagcaacacctgaagcatttgaaggggttcagctcgccttatttagtgctggtggcggtgtatcaaaagcacttgcgccagaagctgttaaacacggagcaatcgttgtggataatacaagcgcattccgcatggacccggaagtgcctcttgttgtacctgaggtaaacgaaggggacttgaatgatcataaaggaattatcgcaaatccaaactgctctactattcagatggtcgcagcacttgaaccactgaaacaagcatatggccttactaaaattattgtttctacttatcaagccgtttcaggtgcaggtgcaaatgccgtaactgaaatgaaagagcagtctcaagcggtgctaaatggtgaaaactatgaaccacaaatattgccagttaaaggcgataagaagcactatccgatcgctttcaatgccatcccacaaatcgatgtatttgaagaaaacggatttacttatgaagaaatgaaaatgataaatgaaacaaagaaaatcatgcatgatgctgagcttcatgtagcagcgacttgcgttcgtcttccaattgaaacaggccacgctgaatcggtttatgttgaaattgggaaggaagatgtgagcgtagaagatgtaaaagagctcttgaaaaatgcgcctggcgttacgctaaaggatgatcctgcaaaccaggtttatccaatgccagttgatgcggtaggcaaatcagacgtttttgtcggtcgcattcgaaaagatttaaatcaaaaaaatggcttccatatgtggattgtctctgataatctactgaagggggcggcatggaattccgtgcaaatagctgaaagcctatccgacctaaatattttgaaatagacataagaaggtgttctgaatgaaagtcatcgtgcagaagtttggcggtacttcattaaaaagtgaagacggcagactgagagctgttaaccatattaaagacgcagtgaacgatggatataaagttgttgtcgttgtttccgcaatgggccgtaaaggcgatccctatgcaaccgacacgcttctaagcctcattggcgaccgagatcgaaaagtaacttctagagagtacgatttgcttgtatcatgtggcgaaagcatctcctctgttgtgttttccaatctccttttaaacgaaggtttgaaagcaacagcctatactggtggtcaggcaggcttcatgacaacagctgagcatagcaaagctagaattttggaaatgaagtctgaacgtttgatggaagagttaaagctcatggatgtggttgtcgtaacaggctttcagggtgttacaaaagatggtgatgtaacgacgcttggccgtggcggtagtgacacgtcagcagccgcacttggtgctgctctttcggctgaatgggttgatatctttaccgatgtggaaggcattatgacggctgatccaagaattgtggaaaaagcccgaccgctttcgatcgtaacctataatgaagtatgcaacatggcgtatcaaggagcgaaagttattcatccgcgcgctgttgaaattgcgatgcaggcaaaaatcccgctaagaattcgatcaacgtattcctcgtcgactgggaccctggtcacatctgcgactggaaaaccaactggcgaacaagttattgatcggctcattacgggtattgcacatgtgagcggcgttacgcaaattaaagtgtatgctaaagaaggacaatatgacctacaatcacgcgtatttaaagcgatggcacttgaaggcattagcgtggactttattaacattagcttaactggtgttgtgtacaccgtcatggaagaaatgacggagcgcgccgtggccacgctaaataacatgggttatgagccagaagtaatcgaaaattgtgcaaaggtttcagcagttggtgctggcatgagcggtgtgccgggcgtaacggcaaaaattgtcgagtcattagcggtagaaaacattgatattctgcaatcagctgattcccataccacaatctgggtactcgtgagacagagtgatctttcagcagctgtgaacgccctccatgaaacatttaacctccatctggatccagcgcaagaaatggaacagatgatggatcagctttaagtgaaaggcaaggagtgaacgagatgaattttggaaaagtacttacggcaatggtgaccccatttgatcgtaaaggatacgttgattttgctaaaacagagcaactcatcaactatttaatcaataatggaacagatggccttgttgtagcaggtaccactggtgaatcaccaacgctttcttcggaagagaaaattgcgctctttaagcattcggtgaaagtagcagacggcagagtaccaattattgcaggaacaggcagtaacaatacgcatgcgtctatcgaattaacgaaaaaagcagaagctgtaggtgtcgatgcgattatgatcgtagcgccttactatagcaaaccaggccaaaaaggtctttatgagcattttaaagcgattgctgagtcaacgaagcttcccgttatgatctataacattccaggtcgctctgttgtcaacatgactggagacacgattgttgagctttcaaaaattagcaacattgtctcagtaaaagaagcgagcggtgatcttgatcaaattactgacattattacccgcacagaagagtctttctctgtttatagcggagacgatggcttaacgttaccgatcttatcagtaggtggggatggcgtcatttcagtagcttcacatgttcttggcaatgaaatgcaacaaatggtttctgcctatgaatctggtgaggtgaaagaagcggcatcgatccatcaacgaattttaccaattatgaatgaactctttaaggcaccaagcccatctcctgtaaaaacagcccttcaattaaaaggaatggatgttggaagtgttcgtttgccgatggttcctctaacagcagaagaacgctcatcgcttgcggcagctctaaataagtaaggaattgaaacggacgcagctgcgtccgtttttttacattataaaacagtaaatcgaataactcattgtttcgctttttcggatgaatggtaaattcacctctcgttcatactactagtaccagagtaaggaaggggtaccagtatgaacagtgagtatcgaaatgaaaacccgggccaagagcccgataaaaaagatgatcaatcaaaatcaacgctagtggataaaattcagcagcttgggcaaacgaacgttccaagtatggatcagtcgaatattcattgtttaacgatcatcggccaaatagaagggcatgtgcagctaccaccacaaaataaaacaacgaagtatgagcatcttataccacaaattgttgcgatcgaacaaaatcccaaaatcgaaggcgtgttaattcttctaaatacagtagggggcgatgtggaagcaggactcgccatatctgagatgatcgcgtctctctcaaaaccgtcggtatccatcgttctcggcggtggacattcgataggcgttccaatcgcggttgcggcgaaccattcttttgttgctgaaacggcaacaatgacgattcaccccgtgcgattgaccggcttagtgatcggtgtcccgcaaacatttgagtatttagataagatgcaagagcgtgttgtaagttttgttacgaggcattcgaatattactgaagagaagtttaaagaactaatgttttcacgagggaatttgacgagagatattggaacaaacgttgtcggtgatgatgcggtaagctacggtttaattgatgaggtaggtgccgtaggacctgcaatgaaaaagctaaatgaattaattgaagaatacaaaggcaaacaagagggtgacattgtccaatgattctttataccattctcccgaacgaagcggttttcccaccggaccagagcgtgtatgagcaacaaaagatcatcgaatggaatggcgtacagttactcgttgagagaacgtcgcttaccgagtgtcgcgtcgttcaggtgctgagcacagacccacaagactatttaaatgacgctacacagccgggacaaatgttaacgctatcgacttctccgctgaaatagagcctataggaccacgggaagatgtggtatactaggaatagattggtgaacaaaaagcagcccgagatggctgcttttttcaccagctatggcttgtatagaggtgagaaaatggcaaaacgtaaaagaaaaaaagcaacgaagaaacaggccgcctggcagtcacaggtcaaaattgaatttatcggtttaaccgttctggcgtttaccgttttaggtgttttgaaaatgggagttgtcggacgagccatttaccatatgtttcgtttttttgcaggagaatggtatggccttattattgcaggtctcgttctgttcgcaggttatttaattgtgaagcggaagctcccgtcgttctggtcaaggagattggctggattttatttgcttggaacgtcctttttattgttaagtcacgttggcttatttgaaacgctgtctcgtgaagggcagtgggatagtccgtcggttattgccaatacatatgaactcttccgaatggatgttagcgatccatcagaatctagcccgctcggcgggggcatgatcggtgcgcttctctttgctttttgctacagactatttgacgcaacaggaacgcagcttatggcgtttctaatgattttactttctttcgttctcataacaggaaagtctttcagcgatgtgctcggaaaagcgctcgactgggtaaagaactttgtcatgaacacatatgatgaagcgaaatctcttctgtctgaaagcaagaatgcaagaagagaaaagaaagaacagcgtgctgctttaagagagcaagaatcgtcgattgagccagaagaaacgtatgatgtttctgaagtaccaaagaatgctcaagaagaagaagcaccatttgaacctgaaatacgaacctttacagaaagtgcttatccaacgcaagccgaaccacctgttgagaaagaagcgacagaaggaagcgagtcgaataaggaaacagcagatggtacgccaattcaatcgttaacggtgggagaattggaaaacaaggattatcgtctgccatctctttcattacttcagccgccaaagaaagtgtcacaggacaatgaacgtcagcaaatttccgcgaacgcacgtaaattagaaaagacgtttgagagttttggtgtaaaagcgaaagtgatgaaagttcatttaggaccagccgttactaaatatgaagtttaccccgatacgggtgtgaaggtaagtaaaattgtgaatttaacggatgaccttgcccttgctcttgctgcaagagaccttcgaattgaagcgccgatcccaggtaaatcggcaatcggaattgaagtgccgaactccgaagtggcgatggtgacattaagggaagtacttgaatcaaaggaataccagtctcatgcttcaaaagtggcgattggatttggtcgcgatatttctggtgaagccgtcgtctccgatttatcaaaaatgcctcacttacttgtagcgggcgcaactggtagtggtaaaagtgtttgtattaatggcattattgcaagcataatgatgaaagcaaaaccgcatgaagtgaaaatgatgatgattgaccctaagatggtagagctaaatgtctataatgggatcccccatcttttagcaccggttgtaacggatccgaagaaagcttcacaggcgttgaagaaagttgtaagtgaaatggaacgccgttatgagctgttttcccatactggtactaggaatattgaaggctacaacaatcatattaagcgccataatgaaacgtcagaagcgaagcaaccttctttaccttacatcgttgtgatcgtcgatgagctagcagatttaatgatggtggcttctagtgacgtagaggatgcgattacaagacttgctcagatggcgcgtgcagcgggcatccatttaattatcgcaacacagcgaccgtctgttgacgtcatcactggagtcattaaagcaaatatcccgtcacgtattgcatttagcgtttcttcaatgacggattctcgaacaattctcgatatgggtggtgctgagaaacttctaggaaaaggggatatgctcttccttcctgttggagccaataaacctaagcgtgtgcagggcgcgtttttatcagatgaagaagtagaagagcttgttgactttgtaatcgcccaacaaaaagcgcagtatcaggaagaaatgattcctacggataaacctgaagaggcacagccagaagtggacgatgatttatatgatgacgcagttcagcttattacggaaatgcaaacggcatcggtttctatgctacaaagaagatttcgaatcggctatactcgagcagctagactgattgatgcgatggaagctcgtggaatcgttggaccatatgaaggcagtaagcctcgtgaagtactcataagtaaggaagaagaagcgcaatctagctgattgcgcttctttttttgacgtatgggcaaatagacgttctaatgtaaagtaagaagccttacaatgttagaaatcctatcattttaaatattggtaatcgagctttttttcaaaaaactatttccttatctccttgaaaatggtatagttattgtcgaaatatgactattttttcaaaaatatttcaagcgtgtttcaagcccaattttcatttatataattttttgggagccttgaaaacgcaaccaaacaaagcatagctcgatagagagaagatagagcgggcggcgtttaaaaaacatgagggggattaagatgaagaagaagtacggttttatgttgtcagctgtattagctgctggtacgcttttatctgcttgtgggacaaatgaagcgaacaatgaaagttcaggcggcgggagcagtgaaggtgaaagcaacaactttaaagtagctatggtaacagatactggcggtgtagatgataaatcatttaaccaatctgcttgggaaggtcttcagcagtttggtaaagataatggacttgaggaagataaaggctacaaatacgtgcaatccactgcagcaagtgactaccaaccaaacctatcaggtttgattcgtgaagattataacttgatcttcggtattggtttccttatgcagcaagacattcaaacgattgcgacacaaaagcctgaagcgcagctagcacttgttgatagtgttgcggttaatgagaatgatgagccgatggaaaacgttgcgagcattacatttaaagagcatcaaggatcattcctagtgggtgttattgcagggatgcagtctgaatcaaataaagttggcttcattggtggagttaactctgaattaattaaaaagtttgaaagtggatttaaagcaggagtgaaatcggttaatccggatgctgagattttcacacagtatgcagatgatttcaacgcagctgaaaaaggccagcaaattgcggcaactctttatgataaaggtgcggatatcatttatcacgctgctggcggaacagggaatggcgttttcacagaagcgaagaaccgtgcgaaaaacggagagaaagtatgggtaatcggtgttgaccgtgaccagcatgaagaaggtatgcctgagaacgtaacgcttacttctatggtaaagcgtgttgatacagcggttattgaagtttccaagcagacaatggatggtaacttccctggaggacaagtaactgaatttggtcttgaagaagacggcataggtattgctgaaacacaggagaacgtttctgaagaagcactacaaaaagtagaagagtataaagagcaaatccagagcggcgaattggaagtaccaagcactgacgaagagtacgaagatttcgagagctctctataagggatcgtcgaacacgtttcctctagcaggaaaggcgatctactggaaatctcacctacattatagccaaatatgggacgaaggctagtattttcatagactagcctttgtttcatgttttggataagggagtggcatctacatggaatacgtcattgaaatgaggaatatccgtaaagaatttcctggtattgttgcaaacgacaatattacgcttcagctaagaaaaggagaaatccatgcccttcttggagaaaatggcgctgggaaatcaactttaatgaacgtgctatttggcctctatcaacctgaaaaaggtgaaatacacgttcgaggtaaaaaggtaaatatcacagatcctaatgtggcaaatgagcttgggattgggatggttcaccagcactttatgcttgttgaaaaattcacagttactgagaacattatcttagggaatgaaccgactgctaaaggtcaggttgacgttaagaaagccgcaaaagatgttgaggcgatttcgaagcaatatggtttgtcggtagatcctaatgcaaagattgaagatatatccgtagggatgcagcagcgtgtggaaattttaaaaacgctttatcgcggcgcagatattttgatttttgatgaaccaactgctgtactaactccacaggaaatcaaagagcttatagcgatcatgaaaaagctgatttcagaagggaaatcaattattctgatcactcataaattaaaagaaattatggaagtaagcgatcgatgtaccgttattcgtcgcggtgtaggtatcggaacagtggatgttgcagacacgaatcaggatgaactagcatcgatgatggtcggacgtgaagtgaacttttcaattcagaaaaaaccttcagagccttccaatgaaacacttgaaattagtagtctagtcgtagaagatgcgcgaaaagttcctgctgtgaatggtatgaacttatcggttcgtgcaggtgaaatcgttggaatagcaggtgtcgatggaaacggacagtctgagttaattgaggctattacaggcttacgtaaagcgaagtcagggagcgttaaactgaatggaaaagacgtaacaaactggaagccgcgacgtgtcactgaaagcggtataggacatattccccaggacaggcataagcacgggcttgttttagatttttcgattggcgaaaatatggttcttcagacctattataaaagacctttctcaagaaatggcattttaaacttttctactattatggataaagctaaatcattaattaaagagtatgatgtgcgtaccccaagtgagatgacacctgcaagggccctttctggtggtaatcagcagaaggcgattattgcgcgtgaaatcgatcggagtccgaatctattgattgcagctcaaccaacacgcgggcttgatgttggggcgattgagtttattcactcgaaactagttgaagagcgtgacaaaggaaaagcggttcttttgatttcttttgaacttgaagagattatgaatgtaagtgatcggatcgccgtgatttatgaagggaaaattgttgccattgtaaagccggaagaaacgacagagcaagagctaggtctcttaatggctggcgcaaagcgcaaaaaggctggtgagacaacatgaagttattaaaagggaaatgggcgagcattactgtaccgttgctttcggtagctcttggattactcgtcggcgggatcattatgcttgtgagtggctataatcccattgttgcgtatgcagcattgtttaacggtattttctcaaacacgtatgtattaggtgaaaccgttcggcagatgactccgctcattttgtccgggttagccgtggcatttgctttccgtacaggtctttttaatattggagtagaagggcagctgcttgtcggttggctagcatctgtttacatcgggcttcagtttgaagggttaagtcctgtagttcatattcctcttgccattattgcagcagcattagcgggagcgatttgggcctttgtacctggattcttgaaagcgaagtatcaagttcatgaagttattacaacgatcatgatgaactatgttgctcttcatgtcgttaacgcgattattcgtacgtatttactcgctcctggtgagcgaacggatcaaattaacgcttcagcatcgcttcaatcgccgttcttagaatccatcaccgatttctcacgtcttcactacggttttgttgtggcgattattggagcgattattatgtggttccttctatggaaaacgacgacaggctatgaactacgctctgttggatttaacaaatatgcgtcagaatatgctggaatcaatgtgcaacgaaacatcgttctctccatggtcatttcgggtgcttttgctggagcagcaggagcgatggaggggcttggaacatacggttatatgaccgttatggctgactttactggcgttggatttgacggaatcgcagttgcgcttttaggtgcaaatggggcgcttggtgttgtccttgcttctgcactgtttggtgggcttaaaattggtgcgcttaatatgcagtctgttgcacaggtgccaacacagcttgttgaaatcgtgattgcgatgattattttctttgtcgcatccagttacttgattcactggatcagcaacagggtgagcaaaagggggaaaatttaatggatttcatgcagattcttcagctcattattcctgccgctatcttttcagcagctcccctgattttcacggctcttggaggagtattcagtgaacggtcaggcgttgtaaacatcggacttgaagggttaatgttaatgggggctttcacaggcgcactgtttacaatccttggcgaacagtggggaatgggggctgcttctccatggttttcactagtcgttgcgatcattatcggcatgctgttctctttgcttcatgcagtggcaagtatttcgtttcgagccgatcaggttgtcagtggcgtggcccttaacttccttgcggctggtcttgccatcttccttgtaaagaaaatctttgatgcagggcaaacgccgattattcaagaacgtatttataaaactgatgtcccatttttgagcgatatcccgtttattggacctttgtttttctcaagcgcgtattatacatcttatattgcggttgcgctcgccttcctcgtatggtgggttctctataaaaccccattcggcttacgactccgttcagtaggagagcaccctatggcggcagatacgatggggattaatgtgacgaaaatgcgctatgtagcggttatgctaagtggtggatttgccggtcttggcggtgcggtttacgcgacgtcaatcgccgggaacttcagccatgcaacgatttctggacagggctttatggcactggccgcgatgatctttggtaaatggcacccgctcggtgcaatgggagcagcgttattctttggtcttgctcaatcgctaagtataaccggccaacaaattccgggattaaaagaaattccagaagtttatcttcttatttccccttacgtgttaacgattcttgctcttgcaggacttgttggacgagcggatgcgccaaaagcaattggtcagccgtatgaaaaagggaagcgataacttttagataaaagctcttcgtgaaaacggagggctttttgttttgacaataggaaagacagtaacgctctaaaaaagcgtgttctagttcaagagctccaatagctccgtttctaaccgctcgtctccgcttttcatgatctagctgcagtgggcagggtctcgatcgcttcagcatttcaaatgaacacaaagaccgtgttcttttgaaatgcctccagcgcttgtcgaccctaaccgcccactttcgcttttcttttaaaaagtactaattgcttacactatgacacatactatggtataaagggggtaagttttactttcctctaatggtaggtaatggatttaaaaaaggagtgaggtcaatggcgattatccctcatgagaaaacctcgtgcggcggtttgacgctacataggatccagacggataaatataaaacaacgacggttgtggttcaatttaaagcgcgtttgacgaaggagacggtgacggagagggctcttttgccttatgtgttgcaaagcggtacagaaaactattcttcttcgaaagcggttcgtacggagcttgagaagctctatggggcgacgcttggtgtggatcttgccaagaaaggtgattttcatgtgatgacgttccggatggacttcgcgaatgaaaagttcctttctgaagatgagcctttgtttaagaaagccctttctttactttcagaggtgatcatgaatccgaagacggatggatctggcttcgattcttcgattgttgataaagaaaagcggacgatgaaacagcgtattcaatcgatttatgatgataaaatgcgctattcaaatatgagactaacgcaagaaatgttcccgaatgaagcttttggcttgcatatttacggagaaaaagaagaagtggatggcgtgacagcgcagtctctttatgattactataaaaaagtttgtgcagaagatgaaattgatctttatttagttggtgacttagaaggcgttaatgctgaagaagttgtaaaagagcttttcccgtttcaagaacgtagcgatcgaaagtctgaaacaactgaaaaagcctctcttgatgtagaagaaaaagagatccttgaaacacaggaaatcaagcaagggaagctgcatatgggctttcgctctggcgttggctatgcggatgatgaatacttcgcccttcaagtatttaatggcatgtttggaggcttctcacactccaagcttttccggaacgtacgggaaaaagagagccttgcttattacgccgcgtcgcgctatgaaagtcataaaggcttaatcattgtgatgtcaggcattgagtttaaaaactttaaaaagacggttgatattattaaagagcagcttacggctatgagagaaggcgacttcaacgaggaagaaatgaagcaaacaaaaaccatgattcgcaatcagctccttgagacggtcgatgacgcaaaaggaatggtcgagctgctctatcacggtgttgtctctcaaaagttacggacaattgaagagtggcttgatggtgtggaagctgtgacaaaagaagagattttagcggttgcggataaggttaagcttgataccgtttatttcttaaaaggcgaggaggcttaatcatgaaaactattccatttaatcagttgcaggaaacgctgtatcaccaaacgatggataacggacttgacgtgtatgttctccctaagaagggtttcaataaaacgtacgcaacgtttacaacaaagtacggatcagtagacaatcactttgttcctttaaacggttcagagaatgtgcaagtgccagatggcattgctcactttcttgagcataaaatgttcgaaaaagaagaccgtgatgtatttcaagattttagtaagcagggtgcgtcttcgaatgcatttacatcgtttacaagaacagcttacttgttttcaacaactcagaatgtgatgcagaaccttgaaacgcttgtgaactttgttcaagatccgtactttagtgaccagagtgttgaaaaggaaaagggtattatcggtcaagaaattgaaatgtataatgacaattctgattggcgtgcgtattttggcgtcattgaaaatatgttccaccaccatccggttaaaatagatatcgctggaacgattgaatctatcgcaaaaatcacgaaggaatcactttatacgtgctatgaaacgttctaccatccttcaaacatggtgttgtttgtagtaggtgctgtggagccgaatgaaattatgtcctttgtggagaaaaatcaggcagcaaaatcgtataaagatcagccgccaatcgaacgtttctttgatgcagaaccaaagacagtagcagaaaagaagaaagtgttgccgatgtctgttcaagtggctaaatgcctggttggatttaaagaaccaaatccaggacgccagggagaagatcttcttaaacatgagctatccattaatcttgcgctcgatttaatgtttggtcagagttcagagaactatgagaagctttataatgaagggctcatcgatcaaagcttttcatatgattttaccgaagaagagaagttcggtttttcaatcgtaggaagtaacacaagctcacctgatgagcttgcgaaccgattatatgagatgattcaatcatttaaaaatgaatcagtggatactgatcaacttgagcgcatccgtaagaaaaaaattgggagcttcttaagggcgttaaattcaccagagtttattgcaaaccaatttactcgctatcgtttcaacgacatggatttatttgaagttgtcccaatgcttgagtccattacggcaaaagacattgaagaggtaatgaaagggcactttgcagaagattcgtttactgtctgtcaagtcgttccaaaaggttaaaaagcacccagtcgggtgctttttcattgaaagatttaacgggagaggaagagcaattatgaaagaaatattaatcactggggcgagtgggggtataggaagagcgatagcaaagaattatgtaaaaaacggtaaccgtgtttatgctcattacaatacgaatgctgcctctatacaagatctacaagcggattatcctgaagcagatattttcccagttcaagctaacttagcgcaaaaagacggcgtagaggttttaacagagaaggttggggaagttgatacgcttattcttaatgctggaaatagctactttggtttattaaccgatatggcaggggatgaaattgatgcaatgattcaactccacctcacatcgtccattaaacttgcgaagcactacatttcttcgatggtgcaaaagaagcaaggatccattatcgttgtctcttctgtcttcggtttaacaggagcttcttgtgaagtggtttattcttccgtaaaaggtggtttgaatgcttttgtgaagggcatagcgaaggaattagggccaagcggtgtcagggtgaatgccgtagcaccaggctatatttcaacggagatgaacgcacggttgacagaggaagatgaacacgatttaatggatgaaattccgatgggacgatcgggagcgcctgaagaggtagcttctttgatttcatttttagattctaatcaagcttcttacataagcggtcaaattatttccattgatggggcctggcaataaaaaacgatgcataatgtctattccttcgagacaacatataggtgatgacttgataaaggagggacatagatgtctgtactagataattttgaatcatggaaagggttcttgcatgaccgcctaagtcagggcgagcagcaagggctttctcaagaagttgtctcagatgttgcttatcagatcggcggatatcttgctgatggagtgaaagcaaagaatgagcaagaacagcttcttgctgacctatggcatgtagcaagtcaagaagaacagcatgcgatcgcaaatatgatggtaaagcttgttcaaaacgaaagataaaagatgactctaaaaaaaaggagggtgcactaacacccttcttttttctatgaaaatgttcaaatgttgtaagaaaagtaaacaaaatccctattcatctcttttaacctttatgaaaatcatttatgattaaaggaacataggaaatttgtggctaaaggagttggcgtatggagaagaaggaatggtatctggagtatgaaatacataaaaataggccgggtcttttaggcgacgtcgcttccctgttagggatgctcggtattaatatcattacgatcaatggtgttgacgatatgcgaagaggcctgcttctcctcgttgatgaaattgagcaaatcgagcgacttgagtccattttaaatacaatggataatattacagtgacaaaaatgagagaaccaaaattacgcgatcgtctagcagtacgtcacggaagatatatccagcgtgatgcggacgataagaaaacgtttcgatttattcgagacgagcttggcttgctagttgattttctagctgaaatctttaaacaggatggccataaactcgttggaattcgtggaatgccgcgagttgggaaaacagaatcaattgttgcttctagcgtttgtgcaaacaaacgatgggtatttttatcttctacgatgttaaaacaaacggttcgcacgcaaattgcggacgatgaatttaatagcgatcatatttttttaattgatggtatcgtttccgccagaagagcttcagagcggcactggcaggtgcttcgtgatattatgagactaccggcaacgaaggttgtcgagcatcctgatatatttgttcaagaaacagagtatacgatgaacgattttgattatataattgaattgcgagacgatccggaacaagaaattacatatcaggtaattgaaaatcgatcttctggattttcaaacttagactttaactaattggtaggtgtttttcattgacagagctaggtcaacgtctgaaggatgctcgaaatgataagggattatcgctcgaggaaattcagtccattactaagattcaaaaacgctatcttcatgccattgaagaaggaaattacgaactgcttccaggtaatttttatacgcgtgcattcattaaaaactatgcggaagcagttggccttcacggagatgaattgcttgaggagtacgcttccgaaattccaaaagcaaacgcagatgtgcctgaaagtttaccaccaaggaaaatgagaaggccttcaacaccgagcaagtcatcttctgtatcatcaaaatggtcttccgtttttccatctgttcttgtcgtgctactcattgtaggggttgcagcgttaatctggtatgttgttcagagtggtgatcagaagacgaatcagaacgcaacgacgaatcaggccgaggagcaagtgacaagcgatgaaaacagtgccagtgctccagactcagatgaagtaagtaacgaagatgaggcagcctcagatgaagcaacaacttctgaagaagagcaaaaatcaaaagatgaagaatcagcagaggaagaaaaggctgctgagccagaggaagagccagagaaagaagaagctcctaagatggagattaagaaagtaaagagtgatgctgacaactctacgtttgaaatcacaaacgcagataagtttgaagtgaagctagaagcatctggatctagctgggtagctttaacgggtgcgagtgacaaaaagtatgtatacgagagtcttgctaaagggaaaaacgtcacgcaagatttatcaaaagagtcttctgctacgcttcgactgggaagttctccaagcattgaagtgtttgtgaatggcgagaaaattgacattccaaaagagccagttgttcaaaatgtaacctttacttttaaaaaagcagaataaattcacacggagtcatcttttcggatggctcttttctttcaattctcgttggtgaagtttccctttctgcatgaatgaaacagtgatagaatagaatacgatttagtggggttgtgacgaagaacagtaaaaagagatcagcgcacgatcaataggttacataacatttaggaggaagacacgtgaatttgcctaataaaattactgtatcacgcatttttttaattcctgtttttctaatttttctcctcgcgccactgccgcttggtgaaactgaaatcgcaggcaccgtcttattgaattcccaattaattgcaacagcgatttttattttcgcatcggtaactgattggattgacggttatatagctagaaaacataacctagttacgaatcttgggaaattcctcgatccgcttgctgataagctactcgttacttcagcgtttgtttcactcgtcgagctcggggctgcgcctgcatggattgttgtggttatccttagtcgtgaatttgctgttacagggctaagattagttgcttcttctgaaggagaagtacttgcagcaagcaaccttgggaaattgaaaacctggattcaaatcatcgcgatcattatgctattgattgagaatgttccatttgaagccattggctttccttttgcaacgatttccctgtgggcagcgctcattattaccgtctattcgggatgggattacttctcgaagaataaagaggtcctacttaaatcacgttaacacctttagggaacagattattctgttcccttttgagccctcaaaagccattcaatttaagcgtatctttgtttctctagtgcgcattcttatacgtaatggcaaaaccattgtataatggaagaggaagaattatgagctattgaatcagaaccttgattcaaatagaggggatggttacaaatgaatgctgaaataattggaatcggttcagagttattactcggacaaatcgcaaacacgaacgcacagtttatctcacaacgcctagctgatcttggcattaatgttttctatcacacggttgttggcgacaataatgagcgtttaaagcaggcaattgaagtcgctcagacgcgctcagatctactcgtttttacaggtggacttggtccgacaaaagatgatcttacgaaagaaacgatcgcggaaactcttaataaacagcttgtttataacgaagaggcgatgaaaacgattcaagcctattatgacaaaacaggtgctccaatgtcggaaaataaccgtaaacaggcactagtcctagaaggtgctgccgtgcttcgaaatgataatggcatggctcccggtatggcacttacggagaacaaccacacgtacatgcttttccctggtcctccgaaagaactttacccgatgtttacaaactacgcagagccctatttacttggccagctgaagcagggagatacgattgtctcacgtgttcttcggttttttggtattggagaatcgaggcttgaaacagaacttgaagacttaattgatcagcaaacgaaccctacaattgcgccgcttgcaggggagtgggaagtgacgcttcgtttaactgcaaaagctgactcaaaagaagaagcaaacaagttgattgatgaaacagaaaagaaaattcatgcacgcgttggaacttttctgtatgggtatggagagacatcacttccaaaagaagtcttttcaatgctaacggatcggaactggtcgatctcaacagcagaaagtctaacaggcgggatgtttagtcaggagttaacagatctccctggagtatcatcacttttctacggtggggttgtgtgttactctaacgaagtaaagcgagagatcggcgtatcaaaagagacactggaagcatacggtgccgtaagtgaagaatgtgcgattgaactcgcaagaagcgtaaaagcgaaatataaaacagacgtcggcatcagttttacaggggttgcaggcccggatcctagtgaagggaaagacgctggcaccgtttatatcggcgtggccgcaccatctggtgaaaaagtggttgccctgaatcttgctgggaaccgcaatgcgattcgcaaacgtactgtgaaacatggatttaatacattattgaagttagaaaggtgaatgtcctaagttatgaagaattttgaagactttgcactatcaaacgaagtgaaaaaagctgtgcttgagcttggctttaaagaagccactccaatccaagaaaaagctattgaaccaattttagaaggaagagatatgattggtcaggcgcagacgggtacagggaaaacggccgcttttggtattcctgtgattgaaaaagtaaagaaaattggtggtcctgaagcgatcattttaacaccgacacgtgagctcgcgatgcaggtagcgattgaactgcagaagctttcaaaatacaaaggcttaaatgttctcgcggtatatggcggagaaccaatctatcatcaaattcgcgctttaaaaagaggcgttaacattgtggttggaacaccgggacgtatgcttgaccatttgaagcgtaagacgcttcgcacggataatattcatacagcgattcttgatgaagcagatgaaatgcttgatatgggctttattgatgatattgaactgatttttaagcagcttcctgttaagcgtcagtcacttttattttccgctactattcctgcaccaatccgtaagctttcaagtaagtatttgaaagatccaattaccatttccgtttctaaaggggatgtaaccgctgatacagtggagcaagtgtattaccgcacgtttgaaagtgacaaatttgatacgctctgtcgcgtgattgaaagcgaagatattcgccttggtattatttttaccaagacgaaaaaaggagctgcgcaagtaacggaatcattaaaaaagcgtgggtaccgagcagaagagcttcatggtgatctgacacagcaacagcgatctaaagtcatgaatctctttagacgatcacaagtgaacttccttgtcgcgacagatatcgctgcaaggggcattgatgtggcacacgtaagccacgtcattaactatgatatccctgaggatccggagcgctatgtccatcgtattggacgcacgggtcgcgctggaaataaagggattgcgctaacgcttgtaacgccgaaggatatgcgcttcctacagtcaattgaatcaaagatcaagttaaatctttcagctgagcctctccaagatgagacggtagatcttgataatatcgtcaaatctgttgaaaagcagctaaaaaaacaaaagcctgattcaacggcccgggacacggctgatcttctacttgcaaaatacaacgctgaagatcttgttcaagcatttcttgaaaatgccattcaagagaagcaaaacacgacgccttctgaatataacttcggtgaaaccggagggcagaacggaatggttcgtttcttcttgaatgtgggtcgtaacattgatcttcaccctaaaaaattgctaagtgagctttcagcgatggcgggtgttgagacagaatcagtaggccgcattgatatctttgagaaattctcgttctttgaagtgcatgaagacgttgcaccgttcgtctacgaagcgcttcgagctggtggtgttgatggtaaatcaatccacttagaacctgcaaaaccacaaaaaagcagagtgtaaaaatgtgacgatcagctccattagggggctggtcgttcttctttcatagtttattcatagagcgaaagaaaaagtcaatagactcttgaaataaaaaagacgaataaatgttcggttttctattggcaaatgacctaaaaagagatatgatagtgatagcttaataacgaggaggaattcattcgtgagtgatcgtaaagctgccttagatatggcacttagacaaatagaaaaacaattcggtaaaggttcaatcatgaaactcggcgaacaagctgagcaaagagtctctacggtatccactggttcactggctcttgatattgctcttggtgtaggagggtatccaagaggccgtgtcatcgaagtatacggcccggaatcttctggtaaaacaaccgttgctcttcatgccattgcagaagttcagcgtaacggcggtcaggctgcatttatcgatgctgagcacgcacttgatccggtttatgcagaaaagcttggtgttaacatcgatgagctattgctttctcaacctgacacaggagagcaagccctagaaatcgctgaagcgctcgtacgaagcggagcagttgatatggtcgttgttgactccgttgctgcccttgtacctaaggctgaaatcgaaggtgaaatgggagatgcacacgttggtttgcaggcgcgtttaatgtctcaagcgcttcgtaagctttctggtgcgattaataaatccaaaacaaccgcggtctttattaaccagattcgtgaaaaagttggggttatgttcggaaatccagaaacaactccaggcggacgtgcgctgaagttctattcatctgttcgattagaagttcgtcgtgccgagacgctgaaacagggtaatgacatggtcggtaataaaacgcgtattaaagttgtaaagaacaaggtggctccgccgtttaaacaggcagaagttgacatcatgtacggggaaggtatttccaagcagggtgagatccttgatattggttctaaccttgaaatcgttcagaagagcggcgcatggttctcattcgaaggcgaacgccttggacagggtcgcgaaaatgcgaagcaattcttgaaagaaaacccagcaatggaagctgagattgaagggcgtattcgcgctcatcataatcttgatgccgataagcaagtggatgaagcggctgcaggtaaagaaacgcttcttcctgacgaagaataaaagctttgaaaaagccggtcattaagaccggctttttctctaactacatagtcttctcaccataaatcttactggatttccatgatcaggcagtgaatgaccattcaattgcggagtttttaagagaagtttaaggcgtaaaaatgagctagaaagagatatttgaagggattttgcctctatgtgctctcttgacaacctttacgctgaaagatacaatattaattgtataattataattttctagtaaaattatactttactcttaaaagatgacatgtgctggattgaaatcttgcaagtggtactaagaattaacatgacagcaaaccaacaagttgatagcaggaggaggtgagttcgatggatatagtgatcatcatctccactatgctggtctctgcagtagtcggagcagttgttggatttcttgttcgcaaaacgattgctgaagcgaaaatctccagtgcagaaatggaagcgcaacggattatcaaagagggtaaaaacgacgctgaagctttgaaaaaggaagctatgcttgaagcgaaggacgagaatcataatcttcgcgttgaagctgagcgtgaaattcgtgaacgcagaaatgagttacaaaaacaagagaatcgtttggtacaaaaagaagaggtccttgatcgtaaaagtgagactcttgacaaaaaagaggattccctcgaaagaagagaggactctctcaccaaaaaacaacgacaaattgaagagatggaaggcaaagtggaggagttgcttcaagagcaacaacacgagcttcagcgaatttccggtttaacgagggaagaagcgaagcaaatcatcttccgtgaaagcgagcaggaacttgagcatgaattagcgcagatggtgaaagagcgcgagaactttgcgaaagaagaagctgataagaaagcgagagaagttctatcgcttgcgattcagcgctgtgcagcggatcatgttgcagaaacaacggtttccgttgttaacctgcctaatgatgagatgaaaggtcggatcattggtcgtgaaggccgaaacattcgaactcttgaaacgctaacggggattgacctaattatcgatgatacacctgaggcagttattttgtccggttttgatccgattcgaagagaaattgctcgtaatgccctggataaactcgtacaggatggtagaattcaccctgcacgaattgaagaaatggttgagaaatcacgcagggaagtggatgaatacattcgcgaggtgggagaacaatccacatttgaaattggagttcacggactccacccagatcttattaagattctgggccgattgaagttccgtacaagttatggacagaatgtcttgaagcattctatggaagtagcttatctaaccggtctaatggccgcagagcttggagaagatgtacagcttgcacgtcgcgctggcctacttcacgatctcggtaaagcgattgaccacgaagttgaaggtagccacgttgaaattggcgttgagcttgcaacgaagtataaagagcatccggttgttattaatgcaatcgcatctcaccatggtgatacggaagcaacatcagtaatctccacgcttgtggcagcagccgatgctttatcagctgcacgtccaggagcgcgtcgtgaaacgcttgagacgtacattcgtcgtcttgagaagcttgaagaaatttctgagtcgtttgaaggcgttgagaaatcattcgctattcaagcaggtcgagaaattcggatcatggtaaaacctgatctagtcgatgacgtttcatcgtatcgtcttgcacgagagattacgaagaaaatcgaaaatgaactggactaccctgggcacattaaggtcacggtcatccgtgaaacaagggcagttgagtatgcaaaataaagcgatgccgcgcgcatcgctttatttaatttcaccaaaaacttacgaacgatactttcttttgataaactaataaagaatgaaaacagagattggagcattactatgaagattttatttattggagacgttgttggttctcctggacgcaatatggtttcaacctatttacctcgcttaaagaaaaaatataaacctacctttacgattgtaaatggagagaatgctgcaagtgggcgtggcattacagagaaaatttatcgtggttttcttgagtcgggtgctcaagttattacaatggggaaccatacgtgggataaccgagagatttttgaatttattgatcgtgctccgaaactcgttagacctgcgaattatccagaaggaacacctggaaatggatcaacgattgtaaacataaatggcgttgaagttggcgtcattaacctgcagggtcgaacgtttcttcctgcgatggatgatccattccgtaaggcggatgaactgattgaagaaatgagagaaagaacaccggttatctttgttgattttcatgcagaaacgacgagtgaaaaacaagcgatgggctggtaccttgatggaagagtaaccgcggttgttggaacgcatactcatgtgcaaacggctgatgagcgcattttgcctggtgggacagcttacttaacagatgctgggatgacgggaccttacgatggcattctaggtatggagcgagaagctgtcattaataagttcctgacaacgatgcctgtgaggtttgaagtgacgaaagggcgggaacaacttagtggggtctttttaacactggatccaaaaactggtaaggccactaagattgaacggattgccatcaacgacgaccatccattctatgattaaagaacgtttggaaaaaatggcggaaacagcaggaatacaagcttcttacaaggaatatagtctagagtggtaatggatgatcaaattaaggaggggctataatggatatattaaaagtttcagcaaaatccaatcctaattctgtagctggtgcacttgcgggcgtccttcgggaacgcggaaatgccgagattcaagcgattggagcaggtgcactaaatcaggctgtgaaggcagtagccatcgcaagagggtttgtagcacctagtggcgttgacctcatttgtatccctgctttcaccgatattttaattgatggtgaagagcgtaccgcaattaagcttattgtagagcctcgctaaatagttccgtcagaaaaacctgtttgtttttacaaacaggttttttatacttttatttgacccataggaagcatgaaggaggatcatcatgaatatagtagatgcacattgtgacgtgctgtgtaaaatgtggcttaacccgtctctctcatttgagaatggtcaaagccttcatacgaatcttgaacaaatgaggaaagcgggagcaaagctacagctctttgcgatttacgttccggaaagcgtgccagattccgctaaatttgattgtgcgctagagatggtggatattttccatgagaaaattgtaaaaccttatgatgacgtcgtagcagtctattcgaaaaaagaagcagagcagcttcctaaagggaaaataggtgtgatgctaacactagagggtgttgatgcaattggaagagaagcaactagactaaaaacgctgatcagactaggcgtgcgatccgttggtttaacatggaactatgggaatgcaacggcggacggtatccttgaatcacgaggcgcaggattaaccgattttggtagaagtgttgttgatttacataaccagcatcggatttggacggatgtgtcccatctttctgtacgggccttctgggatgtcgtcgaacatggacgttatgttatcgcaagtcattccaatgcaaaagccatttgcacgcacccaagaaaccttgataaccagcagttaacgtccttaatcgaaaaggatgccttaatcggcgttacttttgtaccaaagtttttgcgtaatgaccgcaatgctagtgtttcggatattatccatcatattgaacacatttgtagccttggtggtgcggagaatataggacttggctctgattttgatggtattgatcaagttccgaaagacctaacatgctacagcgactatcctcgacttattgaggagctacatcgctattacaatgatgaccaggtaaagggctttttaggtgaaaatctgattgctagaatccctagctaagtaagtatttagtaattgtgagttttatgagcagggaattatcatcctatttcgaactagtaatataagcaaacggtttcaggtactagattagaaagggtgggacgttatgatcgaacaactttcgtggaaagttggaggacagcagggtgaaggaatagacagtacaggagaaatatttgcaatcgcattaaatcgacttggctactatttatacggttaccggcatttctcgtcccgtattaaaggcgggcatacgaataataaaattcgcgttagcacgaaagaagttcgagcggtttcagatgatctcgacatgctgattgcgtttgatcaagaaacgattgacgtcaatgctcatgaacttcatagcagaggaatcattatagccgatgccaaatttaaaccagttaagcctgatcattgtcaggcgacacttgttatcattccctttactgaaatcgcaactgaacttggcacttctttaatgaaaaacatggtagcaatcggagctacgagtgctgctcttggtatagacactgcaacgtatcaagccgtagtagaagaaatttttggccgaaaaggcgaaaaagtagtcaacaataacatggaggctattcagcgtggtgccgatgcttatgcagcttctgctggagaaagtgtccaaactctttctcttaaaaaagcagatggaaaaaatcgcctgttcatgattggcaatgacgcgattgcgctaggggcgcttgcaggtggagctaggctaatggcagcttacccaatcaccccagcatcagaaatcatggaatacttaattaagaagcttccggaatttggtggcaccgttgtgcaaacagaggatgaaatcgcggcggcaacgatggccataggttcaaactatgcgggggttagaacgttaacggcatctgccggaccggggttatcgctcatgatggaagccatcgggttatctggtattaccgaaacgccgctcgtcatcgtcgacacccagcgcggtgggccaagtactggacttccaacgaagcaggagcagtcggatttgctggcgatgatttacggaacacatggggaaattcctaagattgtcattgcgccgagtactgttgaggaagcattctatgatgctattgaagcgtttaatctcgcggaggaatatcagtgtcccgttattttactctcagatcttcaattatctcttggcaagcaatccgttgagccgcttgattacaataagatcaacattcgaaggggtaagctaaacgatcaagaaatcgctgaacgggaagataagtcgtactataagcgctttgaaattacagatgatggcgtttcaaatcgtgtcattccaggaacgaaaaatggtattttccacgtaaccggtgttgagcacgatgaaacaggtaaaccgtcagaagttccacaaaaccgaaaagatcagatggagaaaagactccgtaaaattcaaaacatctcctttcaaaatccgatttacacagtggcgccgcatgatgcgcctgatttgctgctaattggttttaactctacaagaggaagtatcgaagaggttatcccaagacttgaagcggatggcttaaaagtcaatcatgctcaaattcgtctcgtacatccttttccagcagatgagcttaagccattgttacaggcggcgaagaaagtgattgtgattgaacacaatgcaacaggccagctggcaagtctcgtgaaaatgaacgctgggtacggtgaaaagattgaaagtatattaaaatacgacggcaatccattcttaccaggtgatatccatcaacaatgtaaggagatgttcgcgaatggccacatttaaagattttcgtaatcaggtaaagccaaactggtgccctggctgtggagatttctccgtacaagccgccattcaacgagcggctgcgaatgtgggactagaaccagatgatcttgccgtcatttccggaattggctgctcgggtcgtattagtggctacattaatgcgtatggtttccatgggattcatggccgctcgctaccaattgcacaaggcgtaaaaatggcaaatcgcgatttaaccgtgattgcgtccgggggagatggagatggctttgcgatcggaatggggcacaccattcatgcgatgaggcgaaatatagacatcacgtatatcgtgatggacaatcaaatctatggtttaacgaaagggcagacatctccaacgagtgcagaagggtttaaaacgaaaagtacgccttctggatcaattgaatcttccctctccatcatggaactcgcgctctcaagcggctgtggttttgtagcacaaagcttttcaaccgatttaaaggacctcgtagcgatcattgaaaaaggaattcaacataaaggtttttctttgattaacgtgtttagcccgtgcgtaacgtttaataaagtgaatacgtatgattggtttaaacaaaaccttattagtttaaatgatattgaaggctatgatccacacaatcggatgatggcgatgcaaacgttaatggagcacaatggacttgtgaaaggactgatttacgagaatccaactcgtccatcttaccaagaatcagttcgaggctatagttctagtgcgttatcaaaacaagacttaaaccttcctgaagaaaaatttacagagttaatggccgagtttatgtaaggcgacgaacccttcaagtaatgaagggtttttttatgctgaaatggacgtacgaatcttttccataaataaaactataagtgtccttatatggaggacatatcacctttacgttataagtgataaatgatacgatgtttgtgataacggtgtttgaagaacgttttgaaaaagtgaggtgtacgctgtggaaggaaaaatgaaggcgattgtgaaacatgaacgtagcaaaggtgctcagctgcaaaccgtcgatattccacaaattaatgataatgaagtattaattcaagtaaaagcaacttcgatttgcggtacagatgtacatatttatacgtgggatgaatggtcccagagtcgcgtcaatcctccttatgtttttggacatgagtttgcgggagttgtggtagaaaaaggaaagaacgtaacgaacctggaggttggagaccatgtttcagcagaaacacatattgtttgcaaccaatgtccacaatgtttaacagggaagtttcatatttgcgaaaacactaaaattattggtgtcgacacggatggctgctttgcagaatacgtagcgctcccatctcaaaacatctggaaaaatcctgagtcactatcatttgatgtggcttctgtacaagagccgatgggtaacgccgttcatacagtactcgctggagacgtagctggaaagacagtagcgattattggttgtggcccaattgggattatggctgtaggagttgcaaaagcagctggtgcttcacaggttatcgcacttgatttaaatgattatcgtctgaaccttgcgaaagaaatgggcgcaacgactgtcattaattctcgaaatgaagatccacttcaagttgtgaaagagctgactaacggtcacggtgttgacgttgtctgtgaaatgtcaggacatccaatcgcgatgaatcagggcttcaaaatggtaacaaacggtggacgtgtttccatccttagtttgccagtccgtcctgtcgaaattgatgttacgaatgacattgtttttaaaggcataaccgttcaaggcattacaggaagaaaaatgttcgaaacttggcgccaggtgtccgggcttttgcagtcaggacaggtagatgtggagccgatgattacgcatcacttcccgcttgaagactttgaaaaaggcttcgaattaatgattgaaggtaaatgtggtaaggtagtattacatccataaggctcacacgtgagccattacatactaatgaggaggccgatcaatgaaaggttttgaatatctccaagaagagcttgatcaaatgcaggaggaaggcgtttttcgtaaattgattccacttgagtctgctcaagggtcacgcgttacgattaaaggaaaaaacgtcattcagctatcatcaaacaactatctcggactgacggaccatccgaaaatgaagcaagcagcgattgaagcagttgagaaatacggtgcaggaacaggttctgttcgaaccattgctggaacgctctccatgcacgaacagtttgaagaaaagcttgctgagtttaaacatacggaagcagcgcttgttctccaatcaggatttgctacgaatcaggcggtcctttcagcgatcctaacaaaagaagatgtcgtcatttctgatgaactaaaccacgcttcgattatcgatggcattcgcttaacaaaagcgggacgtcgtatttacaagcatacggacatggaagacctcgagaacgcattgaaagaaacgcaagattatcgcacgcgtcttgttgtcacagacggcgtcttctcaatggacggaaatattgcgccgctaactgaaattgtcgagctatgtgaaaagtatgatgcgcttgtcatggttgatgacgctcatgcaagtggcgttcttggtgacaatggccgtggaacagttgaccacttcggtttaaacggacgcgttcacattcaggttggtacacttagtaaggcgattggcgttcttggcggttacattgcaagtacgaaaacacttcgcgattacttgattcataaaggtcgtccgttcttatttagtacatctcatcctcccgcagtaacagcagcttgctcagccgcaattgatgttcttgtggaagagcctgagttgattgagaagctttgggacaatacaaagttctttaaagctgggttaaaagagcttggttttgatacagggattagtgaaacgccagtaacacctgtcatcattggtgatgaggcacttacgcataagttttcagataagctatttgaaaatggtgtgtttgcgcagggtattgcgtttccaactgttgcaaaaggaaaaggccgcgttcgtacgatcgtaacggctcagcattcaaaagaagaccttcaagaagcgctagacgcatttgagaagtctgcaaaagagcttggaattttataaatgaaagtgggagggggagcaatcctcctcttttttgagctcatttcgtaaacggtgcttcgatgaatcacttatacctcgatccttttccgggttttattgattaaatactctgaaccccttataataaaggaatgtccattagttacacatttcttaattgacaataaaggataacgaataaaacggaagcttttatagaatttatttctattagcgaggtttttctaagtttaggagcatttagctctttttcatagcagggtcatcctttttaattagaaaggagtcgaacgacatgaacgaacagcaacgcctggattcgcaaatcaatgtaaagaaaacagagaaaacgactgaagattacgcgaagtatttccagacaacgtaccaggcacctaacttaaaagatgccaagcgcagaggaaaagaaaatgtaaacgttcattacgattttgaaattccagagaatattaaaaaccttggaaaagataagaagtttttgattcgcacgtacggatgtcaaatgaatgaacacgatacagaagtaatggcagggatttttgaagaaatgggctttgaagccacaactgaagtgacagaggcagatgtcgttctcctcaatacgtgtgccattcgcgaaaatgcggaaaacaaagtatttggtgagcttggccatttaaaaccattaaagatggaaaatccggatctgatcattggtgtatgtggatgtatgtcacaggaagaatctgtggtcaaccgcatcatgcaaaagcatcagttcgttgatttaatctttggtacacataacattcaccgccttccagaactgatggagcaagcagtctttggtaaagaaatggtgatggaagtatggtcaaaagaaggcgacattattgaaaaccttccgcggacaagaaaaggcgaaattaaagcatgggttaacatcatgtacggctgtgataaattctgtacatattgcatcgtgccttatacacgaggtaaggaaagaagccgtcgccctgaagatatcattcaggaagtacgccacttagcagcaaaaggctataaagaagtgacgctccttggacagaatgtaaacgcctacgggaaagatttagaagatatcgagtacggcctcggtgatcttatgaacgagattcataagattgatattcctagagtacgtttcacgacgagtcatccacgtgactttgatgatcgtcttgtggaagtacttggtcagggaggcaatcttgtcgatcatatccatcttcctgttcaaagtggaagcaatgaggttctgaagttgatgaaccgtcgctatacgcgcgagacgtatttagagctagttagtaaaattaaaaaggttatgccaaacgcgacctttacgacggatattatcgttggttttccgaatgaaacggacgaacagttcgaagaaacgatggaactcgtaaaagaagtagagtatgacagtgcgtatacgttcatttactcccaacgtgatggcacgccagcagctaaaatgacagataacgtaccaatggaagtgaagaaagaacgccttcagcgcttgaatgctcttgtgaatgaaatggctgcgaaaaacaacgctgtttttgaagggcaaatcgtggaagttcttgtagaaggtgaaagtaagaaaaatgcggatgttctttctggctatacgagcaagaacaaagtggttaactttagaggtcctaaatcattagttggtcaaattgtccaggtgaaaatcacaaaagcaaaaacgtggtcacttgatggcgaatatattgaaaaaacggctgaggtgaatgcataatggtatcaagaatggaagttattgcaaaagcaaaagatcttgcgaagctcgtttcagaaacagaagaagtcgatttcttcaaacgggcagaagaaaagatcaatgaaaataaaaaagtgcaaagcttgattgcgcgaattaagttagagcaaaaagaagcggtaaatcttcagcactatagcaagcatgaagcgttgaaagagaaagatgagcggattgataagctcatgcagcagcttgatgaaattcctgtcgtccaggaattcaagcgctcgcaatctgatgtaaatgaccttcttcagcttgtcgctaacactatttctaatacagtgacagatgaaattattgaatcaactggtgggaacgttcttgaaggaacaacaggctcaacccagcagggacctggttgtaagtaacagctacaatatgaatacgaaagccttccaatcgtgcattggaaggcttttttaaatgcaaagcgacctccttttttcaaaatattctcttaataatctgggatattatgctaatataagcgagaagagttaatcgtgtttactaattacataacgaaagaagttctagcctacttggtatgacaactgaatcgtggagggggtgatcgtttgcgcatttttcatgttagtgaagaagacgatattcatgaatttcagccaagaattcctacgcgtcaagatcttgaccaatcaaaagggcttgtatgggcggttaatgaaacctgtttaccgaactttttaacaccacgaaattgtccgcgcgtttgctttcatgttgggccaaatacgtcagatgctgataagcaaacgtatttatcttcgacctgtcaacatgctgttgttattgaaaatagatggtttgaaacgataacgaaaacaaaactttatttatatgagttggatccgatccattttaaactacaagacgataatgccggctactatgtgagtgatacagctcaagttccaatcaataagattaaggttgatcatcctattcaggagttatttcgtcgtcaggtagaagtgagatttgttgatcagctgtgggatatacatgatgagatccaacatacaacatttcattggtcaatatgtcggatgaagtttgccgttttgaggaggtaagaaaagttaaaaggagagaagaagatgatgaagcttggaaatccaattgctgctggcaatacagcgaaaatctattctgttcaaaatcaaattgtgaaggtcttcagggatgaccttccagatggaaactcttcctatgaagctgagaagcaacgttacgctttatcaaaaggtcttccggtcccggaaattattgatgtaacgaaaatagacggtagacaggcgatcatcatggaaaaaattagcggtcgcacattaggcgagcgtcttttagagaataagaatctagcacatgattatatggagatgtcagtcaacattcaacaaaacattcatcggatcaacgccgatgcgtttgaaccgatgactgaaaagctaacacgccaaataggtacagcggatcgattaagccgatctcaaaaaacagcattactctttaaattaagtgaaatgccagtcaagaagcagctttgccatggtgattttcatctatttaatttgataatgggcgatcaggtgacgattattgattgggttgatgcaagtgcgggggatagccgagcagacgtttacagaacgtatctattgtatactcaattttcaagtgagttagcggaactgtatttacagctctattgcatgaaaaccggcgtatcaaaagaagagatcatggagtgggcaccgattattgctggtgcacgcttagctgaaggagtattatcagaagacagtgggcgcttgatagatattgaaatatgttaagcctaagaggataaagcgtttaggcttaacatatttcaatatatataattttcacgtaccatacttttttaaaaaaataacaaaaggttgtaaagcattggacattcgagacatagactgatagtggaacagcctttatatataaaaaaacttttattctatggtgttggttatgttcttttgctgtgaagaaaaaaagaggaacactggtcgtttgtcttgcataggatgagaatgaagattggaagaggaggtatgatcgatgtcagaggaatataattacagagagatattcgccaaagctgtttgcggaaaagggcgtaaatttacacaggatacaaacacagtaacacctactcataagccttctagtattctgggttgctggattattaacaatcaattcactgccaagaagcgtggtgacgttgtccaagtggaaggctcttacgacattaatatctggtattcttacagccataataccaaaacagaagttgtaacagaaacggttaaataccatgaagaaattcctcttcgctacaaagacaaagactgtgttgctgatgaagttgttgcaaaagcgattcaggagcctaactgtctcgaagctaccattgcgccgagcggtcataaggtgattgtacaagtggaaagagaatttcttgttgaagttatcggcgaaacgaagatttgcgtttacgtgaatccagatggctgtgaagacgatgacgatgattgggattacgatgtagatgatgaagagtttgaagatttagatccgaacttcttaattggtgatttagaggaatagtacgtccagggagaagcaatccttcttcctggtttttattttgtcataaagtacttctgttcggtttaaactgaggcttcctctttactgatccagctcaagcgccggtcgtgtctaaacagaggtttcctctttactgatatgctatactgttaggtgactagatttaagattggtggagaagaaacatggctcgatataccccgatgatggaacaatatttgcgaattaaggcagagtatcaggatgcctttttattttttcgtttaggcgatttttatgagatgttcttcgatgatgcgatgcgcgcatcgaaggaactagagattacattaacgagcagagatggtgggggagaagaccgcattccgatgtgtggtgtgccttatcatgctgctgaaaattatatatcacagctggtgacaaaaggatacaaaatagcgatttgtgagcaaacggaagatccaaaacaggcgaaaggcgtcgtccgaagagaagttgttcagcttattacaccaggaacggttatgtcagaccatttaataaaagaaaaagaaaacaactacatcgttgcgatctcatcgtttgatgatgagacttttgcgcttgcagcaaacgatttaacgaccggagaatccatggcaacgattttagctggcgatcatcatgaagtgatcggtgagctttcaaatcttgccccacgtgaagtgattcttgcgaacgacagcgaagcgctatcgaacgccattcaagagcgcatgactgtgactgtatccattgaagatgacgtgacgattccagacgcattaaagacgttaagcgaccatatcgaccagccaaagctcctgcaagtgtttggcagattgcttcagtatttgattcgtacacagaagcgatcgatggatcacctccagccgcttcgtcactaccacgtttctcaatacatgaagctagatgtgaactcaaaacgaaacctagagcttgttgaaacgattcgtgataaaaagcggacaggctctctcgtctggttcttagatagctccgtaacggcaatgggtgggcgtttgttaaagcaatgggtcgagcgaccgctcttacagcagcgagaaatcgagaagcgtcaggagcttgttgagacgcttatgaaacagttttttgaacgtgagacgattcgcgaacagcttcaaggcgtctatgatttggagcgacttgcagggaaagtggcgtttggtaacctaaatgcgcgtgacctcgtgcagctacgaaaatcacttgagaaaattccagagatcaagcaagcggtgggatctctagataatccgtatgcgaaagagcttgcagaagaaatccttccatgtgatgaccttgttcagctactgcaagaagcgattgaagacaacccaccgctttctgtgaaagatgggcaaatgattcgagacggctatcatgccgatcttgataaataccgagatgcgagccggaacgggaaagattggatcgcggcgcttcaaatgcaggaacgtgagcgtacgggtatcaaatcgcttaaaattggctacaacaaagtgtttggctattatattgaaataacgcgatcaaaccttgcgaacctcccagaaggtcgctatgagcggaaacagacgctttccaatgcggagcgttttattacccctgaattgaaagaaaaagaaacgcttattttggaagctgaagaaaagattgttgatctggagtatagcttgtttacaaaactgcgtgaagaagtaaaggcctacatccctgagcttcagcagcttgcgagaaaaattagtgagcttgacgttcttcagtcatttgcggttgttagtgaagagaaccgcttcacaaagcccattttctcaaaagagcgcaaagtggctgtcgaaggtgggcgtcacccggttgttgagaaaatgttaaaaggcagagagtacgtcgcaaacgacgtgatgatggatcgcgatcgtgaaattctcttaattactgggccaaacatgagtggtaaaagtacgtacatgcgccagcttgcgctcatttccattcttgggcaaatcggctgcttcgttccggcagaatcggcggtgcttcctgtgtttgaccaaatctttacgcgaattggtgcggcggatgacctcgcggcagggcaaagtacgtttatggtggaaatgcttgaagcgaactacgcgataacgcgtgctacgcaagatagtttgatcttattagatgaaattggtcgcggcacctcaacgtatgacggcatggcgcttgcgcagtcaatcattgaatatgtgcatagcgaagtacgagcgaaaacgctgttctccactcactaccacgagctgacaacgcttgaggaagatcttgatcgcgtaaagaatgtacacgttaaagcggtagaagaaaagggaagagttgttttcctacaccgcgtgcatgacggatctgctgataaaagttacggcattcacgtggcgcagcttgcgaacttacctgatgcgctcattcagcgtgcggaagcgatattagctgagtttgaagcagagccagatgttgcgaaagcgccaaaagctcctgtagagaagaaggaaacggtggaagtcaaagaagacgaagcgcagcttgccttcttcgatcaggcggaaaataaaaaaaagcccgctcgtacgtcaggagaaaaagcgattctcgatcgactgaaatcagttgatattatggaaatgacgccgatggatgcgattaatacgctatatgaattaaagaagcacttaaagtcatagagaaagggtgaggaagatgggaaagatcgtacagcttgatgatcagctttcaaacaaaatagctgccggtgaagtggtggaaagaccggcctctgttgtgaaggaacttgtggagaatgcgattgatgcagaaagcagtgaaatcacaattgaaattgaagagggcggtctttccaaaattcgcatcgtagataacgggagcggcatggatgaggaagactgcaagcttgctttctttcgtcatgcgacgagcaaaatcaaaaatgagcgtgacttatttcaaattgaaacgctcggtttccgtggagaagctctacctagtatcgcagcggtttctcacttagaattgaaaacctctacaggagatgcggccggaacgtacgttaaaattgaagcagggaaagtagctgaatttaaagcgactgatagtcgaaaaggaacggaaatgacgattacgggtttgttttacaacaccccagctcgcttgaaacacatgaaaaccgttcatactgagcttgcgaacgtagcggacgtgattaaccgtcaggcaatggctcatcctgacatcgcttttcgcttctatcataacggaaagaagctgttgtcgacgacaggaaacggtgatcttcttcaagtgattgcggcgatctatggctataacactgcgcgtaaaatgctcccgttgaaggcagagacaatcgacttttctgttagtggttatgcggcaaagccagagttaacgcgcgcttctcgtcaatatatttcactgattattaacgggcgttacattaagaactttccgatagcaaaagggatacagcagggctaccatacgcttcttccaatcggacgctatcctatcattgtgcttcatattaaaatgaacccaacgctcattgatgtgaacgtacatccgtcaaaattggaagcgcggattagtaaagaacaggatctggcgctcgccattgaaaatgcgattaaagggatttttaaacaaattgaactgattcctgagcaagctcctccaaagaaaaaagaggaggaaagcgagcagccagcattccagtttcaacacaatgttcaggagaaagagccggaaaaaattccgattcggcgagaatggacgccagagaaggtggaacattcggaagagcagtcgaagcaacgggaagatttccttcaaccttttagtataaaggaagaaattcaaatagagcattacgagtcgatggctaaaacacattcgcggccatctgaaacccgagatgagcttgagatggccatggactatgtaaaggaagcgaacggtgattcacgtattccgccgctttatccgatcggtcaaatgcacggaacgtatatcctagctcagaatgagaatggactctacattattgatcagcacgccgcgcaggagcggataaagtacgagttctatcgggaaaaagttggcgaaatcgatcctgttgtacaggagcttctcgttccaattacgctcgaatacaacacttcagagtctgcgatcattgatagtcggatagatgatcttgcgaaggtaggcgttttcttagaatcattcggaaccaacagctatatggtgagcgctcatccagtttggttccctaaaggggctgaacaaaatacgattgaggaattgattcaggaagtcgttgataatcgtagaattgacgtgaagaaactacgtgaggaagcggcgattatgatgtcctgtaagaagtcgattaaagccaatcgtcatttacgtgatgacgaagtgttcacgcttttagagacgcttagacaatcaattgatccctatacctgtccacacggacggccgatcattattcattactccacttatgagatggaaaaaatgtttaagcgggttatgtaacgagcacaatgaaatgagaaaagaatgcaggaaagtacgtgagagtgatgactaaacagaaactagtaacggttctaggtcccactgcggttgggaaaacaaaaacaagcattgaacttgcgaaggcgcttgacggtgaaattattagcggcgactcgatgcaaatttaccgtggcatggacattgggacagcgaaagtaacagaagaagagatggaaggcattcctcattatttaattgatattaaggagccaacggaaagcttttcagctgctgaattccaaaatcttgccaccgagcttgttacggatattaatagccggggaaaagtgccgattattgctggggggacaggtctttacgtgaaatccgttacccatcagtacgctttttcagaagcaaaggaagatccggcataccgacagcagcttgagcaacaagcggaagaagaagggccggtcacgtttcacgcacgattaaaagatgttgatccagagagttacgagacgatccatccaaacaatgtgcgaagagtgattcgagcattagaagtgtatcacgtgacgggtgaacctgtctctgcttcaaaagatgccctacctgagcagtctccttacaatcttgtcaatgtcggccttacgatggatcgcgatgtgctttatgagcgcattaacaagcgtgtggatctgatgatggaggctggactacttgaagaagcccagcgactttatcatgggggcgttcgtgactgtcaatcggtccaggcgattggctacaaggaaatctataattatcttgaagagcgtgtttcattagaagatgcggtcctcgagttaaagcagaactcaagacgatatgcaaaacggcaattaacgtggtttcgtcatcagatggccatggactggtacgacatgacagcgcatcgtgaagaaaaaattcaagaaatcttgaaagttgttgcaggaaagttagcagaaagatagaaatgtagttaagaatgcctttagagaaaaagaggaggactgacaatgaagcagcaaattaacatccaggaccaattcctgaaccaattaagaaaagacaacgtttttgtaacggtatacctgcttaacggatttcagctaaaagggacaattaaaggatttgataatttcacgattatccttgagtccgatggaaaacagcagttgatttacaaacacgccatttctacgttcgctccacagcgatccgttgaaataaattttgaatctgacaagtaaacacatagtccctcgttctggtaaaagcaggatgagggactttttcatatttactaggatgacatttgttgtttttccatataatcgaaatagcgtttcagtgtgagatcggcttttaatccaaactgcatgcgcagctggtcgacggaaagatcattttcaatggctttaatgacgcatgttcgtctcatatgctgagcagatacgccttttcgcaagccggcacgctgaacttcaaggcgaatcattttttgaatcgcgatttcggttaggcgcttcgggcgatccacttcataactccagcgatacgtttggcgctgaaaatcaaatgaaacaaacagcggatcatcgctatgcagccttggtctaacgggcgcgggaatcgtatgataataatcgaacaaaattttcttatgctcaggatttagatgaacggtgcgttttccggaagccgaagtgacgattagttcattttgttcgaaagatagatctttcatagaaagagcagatagctcttgtaacgttaaaccgtaattgaggaaaagcctggcaatgatcaaattccgatcaattagaaattcgcgtgctcttagctggttgtccgttaaatcttcaagtgacacgatcgtctcaagaagtttttgagcttcttcttcttggagaaaatctgtctcgagataaccggcatcttcattcgtaggtaggacgacttctttcattggattggtctttgttcgatttaacgacatataataacgatatacttgatttagtacagtcataattctctttaatgttcgttctgaatagtgacgctcaaggtgcaaatagcgaatatactcctgtagctgctccgttgttagattacgaaagttctcgaaatcgacctttcgatggagagtacgatgccagacggtaaaatcaacgaggtcatagcgatagcgccggagtgtagatgccttgcgtccctttcgttcgagcgactgcaggtacgcttctagaaagtctggaagcggctgattaaaaagctccattcgatgatcacctctcattttgttctattataacaaaatctgtgcgtgtcttgttttacaatgggttacatgtttttgggataattggaaatactattgataaccaaatcgtaaaggagcggttagacatggcctttttttcaaaacagcagcaggaacctattccagaagtagatacggacgtctggtcttgtgcgagtggagattgtgctggctggatgcgagccgattactcgttttccgatacaccagcttgccctttgtgtggcgctgagatgatgagtgaagttcgaaacctaccagaaattaaataatcatgggggaacacatgaataaaattgttgagaaaattagggataaagctgaacaaattgttagcgtgacgaaagcagcgggaaaagggaagcacgttgcctccatgcagcacttttatgacgtttttaccgaacttcccgaagtgcaaaagaaagaggtttcttatttaagaagtcgttttgttttatatacgctccacgaagacgatatattcatgaagatgctcgaacgttcagatcggcatgtacttgagattgatgtcgttgaaaaaggtgatgtgctcactcggtacagatcgtatgaagcgaagagaggcgaacagaaaattcatattcctgaatcctttgttgatcggatcggaacaagttaaacactcttaaggagtgtttttcttttgggcgtttgtcacggattttgggcaggtgcgtatactatcgtgtcagattaaagcgaggtgagcatcgtgcagcaaaccgtaacgcagcgaaaaggtcaaattaatatcgtccttcgtcaaacggaaggactacaagagacggcggatgccgcattaagtcaagcaacgaaaaagcatatgccgcttgagcgaattcagcaggaaatggaacagctaatcgggttaaaagaaatgaaatacttactaaaagaagtctatgcgtggctttatgtgaacaagtgcagagaagaaaatggcttaaaacaaaatacgcaggcgcttcacatgatgttcaaaggaaatcccggcacagggaaaacaacggtagcccgcctgttaggaacgctttttcttgagatgaacgttctttctaagggacatctgattgaagtggagcgggccgatcttgttggggaatacattggtcataccgctcaaaaaacgagagagcttgttaagaaagcaaaaggtggcattctatttatcgatgaagcgtattcgcttgcgcgtggaggcgagaaggattttggaaaagaagcgatcgatacgcttgtgaaggcgatggaagatcatcataaagactttatcctgattctagcgggctattcagatgaaatggagcactttctctcgctaaatcctggcttgccgtcacggtttccacttgtgattgactttccggattattcaaatgagcagctgcttgagatcgcaaaaaagatggcggcagagagacagtaccggttttcaagagagacagagtggaagctaaagcaaagctttgtgaagaagcgtgagcgggaaacaagtgcatttagcaacggtcgctttgttcggaacatcattgaaaaagcgatccgtaagcaggcggtccgcttacttcaggcagacgtcattgatcgctcggcgctcgagctgctcttaccagaagacatccctatagaagattaaatgcgcatctggtatgatgggaacagactgattaataaaggcagggaacgtacatttgaataaagaacgaattgaagcagctgaaccggcgattttgatcggcattcagcttcaaaatcaaacagatgaacagtttgcatatacgatggatgaacttgcggctctaacagagacggcaggaggcgtcgtggaaggaacgctctcacaaaagcgtgagcgtattcattcggcaacgtttataggaaaagggaaagttgaagagcttgcgtcgttaattgaagaaaaagaagcaacgatcgttatcttcaatagtgagctctctcctagtcagcttcgaaacttatcagaagcattagacgcaagagtaattgaccgtacacagctcattttagatattttcgcacagcgagcgagatcacgagaaggcatgcttcaggttgagctcgctcagcttcaatacatgctgccgcgccttgcaggacagggaacgtccttatcaaggcttggaggcggtattggtacaagaggtccaggggaaacgaagcttgaaacggatcgtcgttacatccggaaccgcatcacagatctgaagcgacagctcgacaatacggtcaagcaccgggatcagtaccgcgcacgacgaaagcggaacgaaacgcttcaagtggcgttagtcgggtatacaaacgcggggaaatcaacgatttttaatcgactaacgaaagccgattcctatgaagaggacaagctttttgcgacacttgatccgatgacaaggcagctgaagcttccgaatggttacaacgtgctgttaacagacacggtaggattcattcaggacctcccaacaacgcttgtcgcgtcgtttaaatcaacgcttgaagaagcaacagaagcggatttaattcttcatgtcattgatgcatcccatcccgatcgggagcgtcatgaagaaatcgtgctaaagctattaaaggatttaaaagcgtcgcacattcctgtccttaccgtatttaataaaatcgatcgagcggatccgtctgtgcaaagtagcgtgaatgaacagattctcatctcagctctaaagcaagctgatttgaagcgattaaacgaccgtctacaaagcgaagtgttaaagcaaatggagtacttctcgatttcgattaatgcggaccagggcgataagctcgcttacttgcagcgaaatactgttttgattgagcggaagtgggatgaagaaaaagatcactacagatgtaagggatacgcccctgaacatttatacaagcgcattattaacgagtggaacaacgactaggagtagaaaactatgtttatgaattttacccatcaagaagaactaaaaacactatcacagcaggctgaagaaaagatccagccagttttaagagaaatcgatgcgcgagttgaagcgaatcaataccgcgttcttgaggcatttcacaaaaatcgcattagcgactttcatttcacaccatctacaggctacggctatgacgatacgggaagagatacgctagaacagctttatgcggacgtattcggtggaaacgcaggactcgtgagacctcaaatcgtctccggtacacatgcgatttcaaccgcacttttcggcgtactgcgtccaaacgatgagctcctttatattacgggagcgccgtatgatacgttagaagaaattgttggaacgcgcggcgaaggcaagggatcgctaaaggatttccacatcggctatcaagccattccgttagcgaatggagcggtagattttgacgctgtcgagagggccatcaccccgcaaacgaaaatgattgggattcagcgctcgaaagggtatgcaaatcggccatcttttacaatcgcagaaattaaaaaaatgattgcttttgttaaatcgatcaaagaagatgtgattgttttcgtggataactgttacggagagtttgttgaagagcaggagccatgtcacgttggtgcagatctcattgcaggatctttaattaaaaaccctggagcaggtatcgtcaaaactggcggttaccttgtagggagagaagatttaattgagctttgcggctatcgcttaacgtcccctggaatcggaagagaagtaggtgcatcgctttattcgttacaggaaatgtatcaaggcatctttctcgcaccacacacggttggtcaagcggtcaaaggcgctgtctatagctcagcgctccttgaagaagcagggttcaacacaacacctcactggaacagcaagcgaaccgacctcattcaatcggttcagttcgatgacagagagcgaatggttgcgttttgtcaggcgattcaggcggcatctccggtcaatgcacacgttcgtcctgaacctgcctatatgccaggatacgaggatgatgtcatcatggcagcgggaacgtttattcaaggagctagccttgaattatcagctgacggaccgttaagaccgccttacgttgcgtacgttcaaggcggcctaacgtttgaacacgtgaaaatcagcgtccttcgtgccgttgatgatttgttgaaaaaaggtttgattactgtttcataagggtaaaaggtagggatttaagtccctgccttttttttacgcgaaaaagcatgtgagattatctcacgtacgttaacacggtaacgtaaacattcgtgtatgatgagagtaagtgaagaagggagcggcaatttcgaatgttaatgcgattctgaattttagaattgcttgaaactgtcctcaagtggagagagcaaaagagcgtgaagacgtgaagcactcggttatccaaagcattcactaaatctttttatttcttaaggaggattcattttacatggcgaacaaattcacagcagacgatattaagaaaatggcgcaggacgagaacgttaagttcattcgcttgcagtttactgacctactagggattattaagaacgttgaaattccagttgatcagcttgagaaagctcttgataataaaatgatgtttgacggttcttcgatcgaaggtttcgtacgcatcgaggaatccgatatgtatctttacccggatcttgattcatgggtagtcttcccatggtcttctgaaaaaggaagagttgctcgtcttatttgtgacatctacagcccagacggcacgccgttcgaaggggatcctcgttcagttctaaaacgcgttctaaaagaaatggaagagcttggcttctctgacttcaacattggaccagagccagaattcttcctattcaaaatggacgaaaacggtgaaccaacgcttgaacttaatgacaaaggtggatacttcgaccttgcgccaacagaccttggtgaaaactgccgtcgtgatatcgttcttgagctagaagacatgggctttgaaatcgaagcatctcaccatgaagtagcgccaggacagcacgaaattgactttaaatacgctgatgctcttacaacgtgtgacaacatccagacgtttaagctagcagttaaaacaattgctcgtcagcacggtctgcacgcaacgttcatgccaaagccacttttcggtgttaacggatctgggatgcatgcgaacatgtccctctttaaagatggagaaaatgcattctacgagccgaaaaatgagattggtctaagcgaaacagcacgtcaattcattgctggaacaatgaagcatgctgaagcattcacagcgatcacaaacccaacaattaactcttacaagcgtctagtacctggatacgaagctccttgctacgtagcatggtctcttcgtaaccgtagcccgcttatccgtgttcctgcttcccgcggaatcagcacacgtatcgaagtacgtagcgtagatccatctgcgaacccgtaccttgcaatggcagcactacttgcagctggacttgacggcatcaagaacaaaatgacgccaccagcgccaacagagcgcaatatctacgtgatggataagcaagaacgtgtagaagaaggcattacagaccttccagcaacactacacgatgcgcttgaacttcttaagaaagacgaagtgatgatgaaagcactaggcgagcacgcagccgagcactttatcgaagcaaaagagatcgaatgggatatgttccgtacgcaagtacacccttgggaacgcgaacagtatatgacgacttattaagatccaaaccccttgatacgactagtattaaggggtttttcttattttggtcaaaaacacttttttttgtgagtcgttgttttgaccaaaaaaagttcaaaaaaaaaggttttgaccaaatgattagattggccaaaatcacttcaaaagattcttcattaattcagtcttttatagaaatctataataaattacaatgatacataaattgcttgtttgctttatcaaaatgcttcacctgtaggtttaaacgaccatgagattataattaacgcaacaaagatagcacccatataatcaatattcagttaaggagttttttgctgttcaatttgtattcctaaagagtgaagtgcatctttaacagttgtctttgtggggatagagcttagtcttgtatcaatctgtgcggcaattggtgctagttcaggtctaattcctgtgaaaataggatgcacgccaagtagtgatagtactcgataaatttgaaagaggtgttttgtaacaatatggtctaacgtgtaaattccagaaaaatcaatgattaaatattgtatgtgtttgttttgtactttagtagggatgtcttctaaaagctgtctagccctttcttcatcaaatgaacctaccaaaggaagtactccaataccgtttagaagtggaacaactgtagcagataattcgtttacttgattaattatttctttttgtttcttttcagcattttttctttcagttatatccttaacataagtctgaatcgctaaaatatctcctatttgtactggatgacaatataattccacatcgactgttgtaccatcaagcctataaattgtttcttcgatgacgttggctggttccatatatgcagaatgtattcttttttctatacttgccttagaactttcttggaatatatctaaaggactagcacctataagatcttcttttgaagctctaaaaaactcttctgcaacacgattaatatcaattattctaagctctgaatgtataattagcgggtcaagagaaaaatccataatttgacggtaatcaatatcttctattttttctatcaaaatattcaccttctaaaagattatttttatattaaagctatatgttttactacttatatcctactaatatcgtaacaaaaatttatggttctatgggactacattcaaaattccatatcttaaataagaaaactccatacaatgtcttctacagattcagataaaatttctgcgtatttccctatagtttgtccaagactctttcctttcttaaaatataaggaggtgatattttttgaggacttttaaagaggctttttcaaatcgtttactaaaacggaaaaacagaatgatgaataatttgttatcagatatgattttgaccaaaagattggccaaaatcatttcaagatattcttcatgtattcctcgtatttctctagtgtatctgtctcgatttttttactaacgtgtgcataaacgtttgatgtaatttccatacttccatgacctaaccgagtctgaacgtatttcatatctgcaccggcttctaaaagtaaaacagcatgagtatggcgaagagagtgaggaccaggttcaaatcgtggtgataaatttcattaagtgctaatttattttgattctgttgttttttatgaaaatgcagatcattagttagactcttacttattgtaattgttctctttgaattaaaggctttagtgtctccaaacaactctccttttgaacgtgctttgaaatctagagtcttattaatagtaatggacatgacaaaatgccagtcagttgcttttacaatctcataaaaaagagcctatctttattgcagataagctccgagatcatcgaagatcttgatcgttcattcagttccttaaagaaactgtttctcgagcctctaaagatgatttggttaacttcctaatttgttcaggttgctcaagtattgtccaatgaccgctttccttcacttctacaagttcagcattcttcaagtgtttcattacatttttatcaatgaaccccggagataagatatcgtgtgagccctgagcaattaatatagcaagttgaaaaattcatgaccaaaattcagaccaaaaaaagttaaaaaagtacaatgatttttaaatgacgtatttcctaaacactaataaatataggtatttaaagcatgtttaatatctatttaaaccgtaaaatctgttccgtacgcaagtacacccttgggaacgcgaacagtatatgacgacttactaagatagagagaaccccttaacacaattgtgttaaggggttttgtgttgaaaaatctaagtatcatcccatcatccgagcagggagcgagtacaatttgaaaaaggataggcacctaaacaagcaattgagtcaattggaaataaagtatattatgactgaagttaaaggttaaatgattgagatggttgaaaattttaaatctactatgcttctaattgaaaagaggagaaaatttggatcaagagctgcatccttttatattgaatactattcctaaaagtggaactcatttattgaaacaattgttacttggaatgaatcccaatgtcatcacaaataatccacatcatgttttatatggggcgccggaatttaataaaaacgaagatatcgagcgattaaatcacatggaagcgaatcaatttatccatggccacttttactatatgcacttctggaaagatctttttgataaaaatgatttgaagcaaatttttttaattcgggatttgcgagatattgtcttatcctatagttatttcattgataaactaccaaatcatccactatttaaatccttttatgaaaatcaaacatccacgcaggatcgctgtcttactctaattaatggaatgactgatccaaagttaaatttagtttatccttcgattgacacatggtttggaagctttcaagggtggatggagttgtcaaatgtccttactgtcaaatatgaagatcttaatccttcgcatccagcgtgcgatgaaaccctagaaagaataattgcatttctgtgggaggatgggccaatgccaatgaataaagacgagatgatcaagcaaatgattcaaagtataaatccaaaaagctctccaacctttagaaaagggaaatcaggtggatggatgaatgagtttgataagcgatgtaaacatgcatttaaagaaagagcgggacagatccttatcgatttagggtatgaacatgatatggagtggtagtgaggaatcactcaatgctactcacaggactggttggttagtataacaactagattaaaacgaaaagcgacgaatcttacattaatgaagtaagatttgtcgctttttatatggctgtactggctacaggtcgaattcattattatatcaaactagttctcttaacctgctcatatgttcggtatccgccatctagattaattgcctgaaacccattttccttaaggatgcgtgtagcaatataaccgcgaaacccaacttgacaatgtacaaaaattgtttgattcttcggtagttcatgaaggtgatttcttaattgatcaactggaagattaacagctcctttaataaaaccattattaaactctgatgggtttcgcacgtctataagcgtgccgccgttttccgcgatcgcatcaatctcatgccactgaacggtttccatcatgccttcgacgatattactcgctacatatcccgccatattcactggatctttcgctgaagagtaaggtggggcgtaggctagttctaagtcaggtaggtcgagaacggttaagcctcctttaatcgcggtggcgattacatcgattcgcttatccacgccatccttaccgactgcttgagcaccgaagatctttccggtttctttatcaaaaatgagcttcaaggcaataggggaggcgtttggataatatccggcgtttgaacctggatgaacgtgcacgacttcataagcaatgcaaaggctttttaaggttttttcattattaccggtcgtagcaacagcatagtcaaatactttggcaatggatgttccaagtgtccctttatacggcgtttttttgccgtaaatgttatcagcaacgagtcgtccgtgtctgtttgctggccatgctaaaggaatcatggttggttgcttgttaatataacatgttacttcgatggcatcgccaatcgcataaatggaaggatcgctcgtttggaggtattcgtttacttgaattccgcctcgtgtacctacagataacccggcatgaacagctagttcattttcagggcggacgccgattgacaaaatgatcagatctgtatcgatttcttttccgcttacggtgagtactttcgttccattgttttcgaatgcctgtacaccgtcatttaaaatcaggttaatgcctttatctttaaggtgctggtgaacgattgtggccatttcataatcgagtggtggcatgatttgatttgccatttcaatcagtgtgacgttcatgccaaggtcgctcaagttttctgccatttcaaccccgataaagccaccgcccacgacaacagcttgggatggcttctctttatcaacataagctttgatccgatcggtatcaggaatattgcgaagcgtaaagagtgtctttgcttcgttaagaccgggaataggtggaacgatcggacgggctcctggtgaaagaatcagttggtcataagtttcctcgtatgtttgatcagattttaaatcatgtacagaaatggttttctttgcgcgatcaattcgtgttacttcgctcaaggtacgaatatcaaagttataccttgcggccatgctttctggtgtttggacgagtagtttcttgcggtctttaatcgttccacctatataataagggagcccacagttggcgtaagaaatatactcacctttatcaaacatgacaatctctgccgtttcatctaatcttcttaaacgagccgctgctgttgagccaccagctacgccaccaacaattacaattttcttactcatatgatcgtctcctttttattaccctgtggggtatttacatttttattatagatcattgaatcaaaaagaaatgtgacatacctcacgttttaatagattggtggagaaatgaaacgaaggtatggtcactactaatagagcttctaaatgttaattagagtgaagagcgtaggatgagtgttaaggtattacaaagatactcctttttgtaaaaagcgatcatctaggcttaatgacagtgaaacctcattacagaacttttctgttagactaagtgaatcggctcgaaggcgtgtggaaatcacacagcaacacttagtttgctagtagttacatatcctacattttcatctgtctatcaagttgcacacttcagctagaatcagttacaggaggaatttacatgaacaagtctagattaaccgcacgaattgcttcatctactttggtggccgcgatggtcttttctccggtcttaagtgaaggagcttttgctaatgtcgattcaaatgacgtgaagcaaagcgattcagttagttcatcaattaacattctgggtagtggggatcgtggcgaggctgttacggcgctgcaaacagaacttgaatcactcggttactatacctatcatgtcgatggtatttttggtcagatcacagaagatgctgttgaagattttcaagaagacaagggacttactgttgacggtatagctggacctgaggttatgggtgcgctatctactgctgataattccggtgctactgaacctacttcagatgaagcacctactgagtccgtctcgcaatctgatgttgtatccactgcgaaaagcttaattggaacgccatatgtttggggcggcacaacaccagacgggtttgacagcagtggcttcatccaatatgtgtttaacgaagctggagtcgacatatcacgaacggaacgtgatatgtggaaatatgacgggacagaagtagagtctccggtgatcggggatgttgtcttttttgaaggcacttatgatgtagaaggagcttcacatagcggaatctatatcggcgacaacaaaatcatccacgctggtagcggcggtgtagaagtcactgatcttagctacgacttttggcaagaccattatttaggcgttaaatcattcaaataaccatcaaatttagccgttgcacgttatttctatcgcgcggttggttcaaaaggggtgctaatcattgagaaaatgattagcactttttttacgcgttttaaaagtagtttgcaagattatggagcacaacgctttaaatcttctaattcatttacaatcagcatctgtatggatatcattgtcattgggaaagaaattttatgaaagcgaaatatgatagggggatagtttgtgatcaggaagtggaactagttacgcagatccatacacctctcaccttcggataaaacagctttgaagcaagaagtgacattaaagcaatataagcaacgcttatttaatgaaaatcgccattatcaaacgttttctctttatcggatcccgagtagataccaaagagtgacatctcttttagcacaagtccagtctcttccaacacttctcttcttgccgtttcctgtactgattcgttaaggtccataaacccacctggtagaccccacgactcgctatcggtacgaagctgcagcaacaagcgattctccgtatcgaaaaccattgcccctgcgacgaccataatcactttctcgtgacctaccattgagcgtaagtgctgtatgtaatccatgaataacctccataattgtttatggttagtctacttatcctgttcaaatcctctttcgttgtcatgattttgaaggagaactgcgcggaagtgaagaatcgttcgagacagcattcttttcgctagatgcgcttcctgatcaactttttaccgaacacaaactgatgatcagcgatttaataaatggtaaagaactgcctataatagggtgagggaaataagtttaaaaggaggaattcaatgacaaatcgaaaagtatctgtttacatcgcgacaagcgttgacggctatgtggcaacggaagatgactcactcgactggctttttaaaaccgatcctgagggagacgcgggctatgaagactttatgaaagatgtcgacaccatgattatggggcgtcgtacgtatgactgggtgatggaacaagagaacggagtaaatccttataaagggaaaatgtcctatgtgtatacgactcaatctagagaaaacatagaagatgtcacattcacatcggaagatccaacgtcactcattgaacgattaaacgagcagggtggtggaacgatctggcttatcggtggtggtggagtcgtgcatgaatttcttgagaaaaatttgattaatgagtttattatctctctagcaccagcgctaattggcaaagggattccgctgtttcagaaaagcgacgttacacatgatcttgaattaaccgatgtgcgccggtacggacagtttgcacagcttcattatcgtgtgaataatgattaataatctaataatagaaagccgatctaagagtgcagcaagcctgatgtgtcttagacggcttttttggttgagatgataaccgattctaattaaatggtaaaattatggtatcgtgtaatggtagaatcgtttttcttagaaaagcgtttaattggagtggttatttgtattgactattaaagatgattttaggatttcttttaatcatgcttggtcctaaagaaactggaggtggcgttaatgaaatggaagccatttttctatgccgttttagctggaatactggctgtttttgttgttttccttctgaatggtttcgtattcgaatgggcaccgtcaataggtatttttcttgggatcgcaatgagtcagtattatggacaacgattactaaatcggaaaaagatataggttgtgtcagcttgtttgagaaggccattcgtaaggcactctgcttggttagtttttcgtgatggacaaactaatcaaaaaagagtgaggtgtaaaatgaagtcgtttctttggagcttgtgttttgtgagcttctttctatttcctacacaattaaaagcgctcacactcccctgtaccatggtcttaaacccagtggaggatactctttcgaatgcaaaagggagtgcgctagtctacaaggtgcaactgaatccaccaagttttgctcgtacaaatgtaagcgtattggcggtgcaccttccagaaccatcgacctttggtgcgtatgatcattatgaaggattcacttacataccaggtgaaataagctggagatttaggcttcatcctactcctgaagagagaccaacttgggcagggaggttcgatctcatcactgcaaaattaaagaatgcccgtgttcaagtaagggctgcgaattccaatatggagaaattaggcccgctagtattaataaatgatataaaagcctgtaggtaatttaattaaagcagtgaaaaattaacttttacacgtattcagatattcgataatcaagcgctcactttttaatgtgagcgcttatttgcgtattcggcaagtgttttagtgaattgcgtaaattctagtatcatgatcctgtttttttatcagcttttgaagataaaccattaagacaaagcgatcatatctctattttaaaaatatttttctttttattactattttagttgtaatgaaacttataattatgtaataatagaaaataattaatgaaagcccttacttataggggtcaggcgcattagaggaggaaggcggcatggcgatcaagaccacatatgttttacaaaaaagagcgagtacggaagaggagtatcctcgaccgcagttcaaacggactgaatggtacgacttaaatggagaatggcagtttgaatttgatgatgaagatcgtggcgaagctgaacaattgtatgatcaaaaaaaagattttacgcaaacgattcaagcgccttacgcccaccagagtaaaaaatctggcgttgagctagatggaaaccatgaagtggtttggtataagcgtgaatttcattgggagaaatacactgataaaaaccttttgctacattttgaagccgttgattatcacaccaaagtttgggtgaatggagaatttattggtgagcatgagggtggccataccccatttagcttttccattacgaatgccatctgtaacggtgagaacacgatcgtggttcgggtggaagatccaaatagtgtggagcagccgattggaaagcagtcatggaaagatgacaactttttatgctggtattcaagaacgacgggtatttggcaatcggtttggcttgaggaagtgcctcttcagtatattcaggatgtcaagatgacgcctcgagtggaagaagggaaactctcgattgaagcgagtctaccacgtcaaaagaaaaaagtttacttcgaggcaaatgtttattttaatgaggagtggattgataccgtaggcgtatggataaaagaaaaccaaacgcgtgttgagctcaccgcaaaagttgaatcggatctagctgattttcgcgtcttttattggacgccagatacaccgaatctatatgatgtaacgtttcaactatatgtcgatcaagagattgtggatacgattgaaagttattttgggatgaggagtattgaaattcaggagggtagaattctacttaacaaagataccttttatcaaaaactaattctcgatcagggctattataaagattcgttgatgacaggggattacaagcagatgaagtctgatcttcttaaagtgaaggagatggggttcaacggtgttcggcgccatcaaacaattgcggacagacggtacttagctctttgtgacgaattaggcttagtcgtgtgggctgagatgccaagtagttttaagtttagtagcacctcgatgtttcgcatgatgaaagaaacgagagagatggtgcaaaaacattataaccatccgtcggttattatttatacccttatgaatgaatcgtggggcgtgaatgaaatctaccaccgagaagatcagcaggcatttgtaaacgctctctattatcagacaaaggctcaggatccgagtcgccttgtagtaggaaatgatggatgggaacatacactaaccgatatcttgacaatacatgattacaattctgatgcggaatctttaagaaatagctatgagaagatggaatttgtaaatgggagtccttcgaaaacaagccgaaagcaaaattatgcgaaaggctatgcatatcgaggggaaccgatcatgatcagtgaatatggcggtatagcttacggtaatgaacagagcgatgttgagtggggctatggtagtcgacctcaaacagaggaagaagtactcgaacgcctagaggcactaacaaaagtgataatggagaatgacgccattcaaggtttttgctacacacaactgacagatgtagagcaagaagtgaatgggcttcttgatcatcatcatgactataaatttgatcctaaaaaaattaagaagatcttattatccaggcagtccaacggttttatctttgaataatagagggggaataaacgatggaaacagcgagaaagtatgcttcacctaatatcgaaacgaaagaggatattcgaccgaaagaatttgcttcttatttcgggtatgggtttgggcagtgtattagctttggattagtaggatcttacattctctttttttatacggatattcttggaatatccgctgcagcagcaagtattattttccttattgccagaacgtgggatgcgattaatgatccgatgatggcttctgtgatggacacgctccattcaaaacacggaaagtttcgaccttatttaaagtacatgccgtttttcgttgcgatcatcacgattgtctgttttctcccattagatggtttaagtcctacagctaagttaatttatgctggtggaacatatattctttggggaatgatttatacggtttctgatgtaccgtactggtcgctctcctccgtgatgagtcaggatgctcagcagcggacgaaattaattacgtttgcgaatatgggggttttcgctgggattgctttatcgccagtcttatttgtcccccttgctgagtggttaggtggagacgatattgggcaggggtatttccttgcaacagtggtgctcatgatttttgcactaccgatcatgctgaatgggtttaaaaatacgaaggaacgtgtcaaagctcctaagacaaaagtaaagctctctgatgcagcacgtgccattaaagcaaataaaccgatgttcgccgtattagtcgttttcttttgcaacgtctttatgaatattactcaagccttaaacgtcttctttttcacatacaatcttggaagcgcttcactcatgtccattttcggtattattagtttagctagctgtatcgggtttttcattatcccaacgctagcaaagcgattcaagaagaagcatatgctcatgaccattgttgcccttgatattgtgatccgagtcatctggtatactgtaggttactccagtgtatttgtttcctttatatttattgcgatcacaatgctactttacactgcaacgggaccattgatttcctcaatgctagcggaaacaatcgaatataccgaattgaaaaccggtaaacgaaatgaagcaatcatcttctctggacaaacctttacggggaaactatctgtagcaattgctggtggtgcgactggactaatcttaacatggattaactatcgtccaaatgaagctcaaactgattttacacttgatatgatgtttttcgttatcgctctattacctgcattaggttcacttataagattaattgtgatgtatttctactcttatacagaagacgagtacaatataattgttgaaaaactgcacgaaagaaaattgagagagcaataagtcacatttaaaaatcgtagctcccttagcagggggctactactgttatttcgatagtttgttataattggtcctaggaataaaagatagggaggtctaagtcatttgaaaaagttacagctatcttttgataacatgctgccaattaataaagctcttgcgaatcaaacaagagtgcaaattcttaagttgcttagtgacaaaccatataatgtgaacgatctagcagaaaaacttggattgcctttttcgacaacagcttcacatgttagtaaattagaagaagttgatctcattgccaccgagctagtaccgggaagaggaactcaaaaagtgagtgcgatgaattatgatcgcattgtcgttgatttatatacttcggatgaaaaaaaggaagagcaacaagtgacctacgaaatgccgataggagattatctcgactgccatgtggttcccaattgtggaatcgtagatgagaacggttttatcgggatgcaggatgatcctcgttccttttatgaaccagaccgaaagcaggcacagctcctgtattttaaggatgggtatgtcgagtatcgttttccaaaccgcattccttatggctttagagcaagtgagttagaaataagtgctgaaatttgttcggaagcccccaatcacaaactagattggccatctgatataacggcatgggtgaatcatgaagaagttggaacgtggacctcaccaggggattttggtggtgagcgaggtcagttaacacctgaatggtggcgaaccaatttaacgcaatatggattgttaaagcattggaaactgaataagagcggttgttttttagatggagagaaaatatctgaccgaacaattgatgattttcagttgtctaactacccctacattgcctttcgtttagggataaaacaagatgctgtaaatagtggtggaatgaatttatttggtccaaagtttgggaatcatgaacaggggattgttgtccatattaaatacgaaccaaatacagaaaactaaaagaaagccgttgaaacgtttctgtttatctatttataatcacttactggtacgttcgtcataaatagattgggggatctagatgaaagttcgcattgaaaaactacaagaaactgatgctgaaccattatttcagtttgaagtcgaaaaccggtcttactttaggacgatggtgcctgatcgtggggataattattatcactatgaatcgttcaaaaacaaacttgatcagttattattggagcagtcacagggccaatcaacattctatttaattagagatgaaagttccgctattttagggagaatcaatttagtagacttcgatgcgtctaatggaaaggccgagttaggttatcgaatcggtgagaggtatagtggaaaagggattgcttcgatcgccctcaaactacttttagacgaaatgagtaagaacctagacgtgaaacacattaccgcaaggacgacaaaagataatgtggcctcacagaagattcttacgaaaaatggatttacatacacatataccgatcgtgatgaagttttcttaaatggcaaagaagtaaaattacttcattaccagtggaagaattaattagcaccacttgaaaaatagagtactccctataagctgtcgtttcttacctcaggtggagaagcgatggcttttttgtttagaaaaaaggattgcacgtaacgttcaagtaaatggtatgctttaaacgtcagaaaattcagttataagaagtgggcaggttggagcggtaaacgatatcgggattactgaacttttgacctattcaaatagtgagctgcggtaatttactgcacgaaactattcattcgaaaggagcaaaatgatgagaaacttttataccgaggatccaaatttggcatttctattaaaagactaccttgatctaaatttctttcagtgggcggaagaagaactgatcgaatatggtgagctttgtgcgaatgagattgatgaacgcgcacgtcataccgatcaagagggacagccaagattggtgaagtatgacaagatgggcaatgacatttcctatgtctggcgaaatgaaggctacctcaaaaccgttaagcaaacttatgaccgtggaattgtaggctatcttcataaagaaattcctgcgttaggcaagagagggaattacatttattcgtttgcgcaagggtatcttctttcgcaaaccgaaccgggattttattgtcctgtaaccttaacgatggcaacggcttatttacttgatcactatgcggaagagaaattgaagaacaaatttttgccgcacgtccttgcgacaggggatgttgagctatatgaaggagcgacttttctaaccgaacgccagggtggatcggacgtaggagcgaatgaaacgcgtgctgtaaaggaaggggatcattaccgattaactggagaaaagtactttgcgagtaatgcaggcgcatgcggtgttgcgatggtattagcacgcatcgataaccaaacgccaggtacgaagggattaagtttgtttttagttccgtggaaaaaagaagatggatcgaacaatgatctctccattagaaggttaaaagataagctaggggtaaaggcagttccttccgctgaagtcctccttgaaggctcgaaagcataccttgttggggaggcatcaaaaggtttttcctatatggcagaagcattaaacttgtctcgcctttgcaatgcgattgcgtcagtagggattatgcagcgagcttatcttgaagcgaaaagctatgcgtatgagcgaggtgcttttaaacaaaaattaaaggactttccgatgatacgagaatcacttgtgaatatgaaggtgaagcaggaagtagaaatgagtgcgattttctcgagtattgcgctttttgataaagtcgcaagcgggcaaagtgtgagcgaagaagatcaggcgctaaatcgtttgctgattgcgctagtgaaaaaagagtcggcagagcaggcggttcacttctcccatgaagcgattgaaatgcatggaggaaacggctacattgaggattttgttacaccgcggctactccgggatgcccaagtattaaccgtatgggaaggaacggggaatattcttggacttgaagtgctacgtttaattcagaagtatgaagttcatcatttatttttctctaaaatgaagaaggagctcgatgatctccctaaaggtttatcggaggaagtaaagaaagtggtaacagcgattaattcagcacatgtgcgtatcaaccaggtttgccagatggatcagtcgatgcagacgtatcactgtaaacgaattacgaaatggttatcggatatttttgaatgtacgattgctttgacggatgcagctaggtttggaaaaagaaaacaagcagttgctcaaatctttatcgataaaacgttacaaaaggattcttattccctaagtgaacttaccctcaatcattatgagcttataattgagaatccaccaatttattcagaattacaaagaacgtaaaaaaaagatctcaccttctaatgcatgaagggtgaggtctttttgatggtctatttagagtgagcatacttaacctggctgcctttgaccaagttcctggtcgatcagtaggaaagaggacgtgttatctccagctaatttcaacctttccacaatcgtgagagcttgagcttcttcgtcgatttgttcgcgtaagaaatcttgcacgatgacggtcgtttggggatcaatcttcttaatatagttataagcctgccggtaagaattcgtaacatattgttcgtgttctaaaacttgctggaacgtttcaagcggcgttccaaagtcgatcgattgttccggtaaagagcctaattcaacgacaccatctttaccagttaagtaattaattagtgtgagaagatgcgtgcgttcttcatcagactgaatgcgtagccaactggccattccagtataattcttccgatccaagtaagcagacatcgctaaatatagcgtggttgaaatgtgttcaatttgaatcagtgtgtttaaaagttcttgaacttctttttgtaccattacaatcacctcatcatcttcataccatcacaagttatgaaaatgtggattgtctcgttccgattaagagagcgaccttcaagtagtaatcgacaacaaaaaaagaagcgcaatttgcgcttctagtggatcgagcggaaaacaccaaccactttaccaaggatcgaaacagaatcaagaatgatcggttccatcgatgagttttccggctgaagtcggaagtagttgctttctttaaagaaacgttttaccgttgcttcgccatcgtccgtcatcgcaacaacgatgtctccgttatttgcagttggttgctgcttcacgataaccatatcaccgttataaataccagcttcaatcatactatccccttcgatgacaagaatgaatgtatgctcttcatcctgagcaaactgctccggaagagggaagtactcttcaacattttcaatcgctgtgattggttgaccagctgttactttaccaatgacaggaacattaacagtgtgctgacgtgggatgtcgatcgcttcatcaaggcccaacacttcaatagctcttggctttgttgggtctcttctgatataaccttttttctcaagtcttgccaggtggccatggacagtagagcttgaagcaagtccaacggcttcaccaatttctctaacagacggtggataacctttttgttttacttcgactttaataaagtccagaatgtcctgctgacgctttgatagtttcatatttctggcacctcgttccaatctatctatttgttactagtataccagaatttttgttcgcatacaaacataagttcgaagttatcagttgacacgaacaggggttctgattatactaaaaacagaacaaatattcgtatatggggtgattgggatgagaaagcaagctgggggcttgtctggaattgattttcttgtcattatatcttttgtagctgtgttaattattgtgttcgtatctttgcgaacagctgcagctgaggagtatgatcggtacacaacgattcaactggagcgcggtgatacggttttagaaattgctgatgaatatcgttccgcacatgaattgtctgatcagaaatttgttagctgggttgaagacgctaatcgcatagatgctaatcgaattacagcaggagatactctcatcatccctgttgaagcgaacgctaccgcacttgggggtacagaataaagaatgaacgccgttatttattgccgagtaagtacaaaaaaagaagcgcaagagtcatctcttgcaaggcaaaaagaagaattgcaacgttttgcatcacagtcaggatttacagttcaccgaatgattgaagaaaagcacagcgggtatgacattgatcgagatggcatactcgaggtactggatttgttaaaagaagggcaagtcgaagcattgctcattcaagatgaaacaagacttggacgagggaacgccaaaattgctcttcttcatgccgttcacaaatatggcggaaccatttatacggtaaatcaaaacggagaacttcaattatcggaagctgattcaatggtgcttgaaattgtaagtattgtcgaagaatttcagcgaaagcttcacaacttgaaaatcaaacgcggtatggataaggcggtgaaagatggttatcgccctcaacgaaatcttagtcatcaaaattacggtggaagagagcgtgttgaagtaccgattgaggaaattgttaaccttcgtaaccgtggcttaacgttccatgagattgcagcaacgcttaaaggttttggtcaccatgcatcaaaagccacggtacatagacgctataaggaatatgttgacgaacagagtgagaagcactaaacttgtctatggtaaaaagatgcgttagcatagaatgcacaagttgtagtaaaggagcttttttacatgctttctcaagataaaattcaacgaattaacgagctatctcgtaaatcaaaagagtcatctttaacagaggctgagaaaaaagaacaaaaagatcttcgtcaggaatacttggcaagccttcgttcttcttttagtaaccagcttcactccattaaagttgtggatgaagaaggcacagacgtaacgcctgaaaaattaaaagaaagcaagaaaaatcgcggctttcttcagtaaaaaatagcctaattttgcatttagcaaaattaggctatttttatggttgcaatttttcaaatattcgttatactgtactataacaagatgtactaatacaaaaacggagagggcggataagatgtttgttgtaactgattctgcagctgagttttacaaaaacgaaatggaacttggtaatggagattgtctaagattgtttgtacgttatgcaggaagtggagacagcggtggtttttcccttggagtcatgtctgaccggccttcatatgaagattataagcaagaaattgggggcgttacttactttgttcgaccggatgatcagtggtttgttgatcaaatgaaactagattatgatgaaagcaacggtggcgttctttgtgacctgccgagtatggcatagcagtcaaggacctgtactataacatctatgttatagtacaggtccttttttaatttcgacaaaactagtgatgtcacgctccaagtatagacaatccttttagagaaggtgcagtatactgttttttatatgatttgttctctgataagggggaagtggtatgaggcattatgaaatgtattttgttaaacaacacatagccgctcaatatgctggcaaagaacatcttttgtatcaacttttacttgaaagaaagcgagcgatccagtcggatgagaaagaccttctcgataagcaggttgcctttattattgagcccattgcagaagaggagctaaactcctatcttgtcaacgaattaggggcattccggacgtacgaatacaaaaacgaagggcaccggttaagtataaaccaatcaaaaagcgatgcttctttgtttgtgagaaaagagaaagtgaatgtctatgcgactggtgggactgaagctgaaacagtcttctttgaagtgattcgaaaattaactccttcttttttcgcgattgacttccaatcaggtcgatatggatggcttaacccgatcaaacagcagaaactagtttgaacaaactcctactattttagtagacgttattgtataatcattacgggttgtagtacactattggaagagaaagaataaggaggaaatctagaatgtggtggatgtacacgcttgtgggcgtgctagcgttgattgctggagtagcacttggcttttttattgcccgcaaatatatgatggactatttaaagaagaatccccctattaatgaaaacatgcttcgtgtaatgatgatgcaaatggggcagaaaccttctcagaagaagattaatcagatgatgaaggctatgaatagtcaaatgacgaacaacgataaatagcgtaatggcactctgttagcagagtgctttttgtatggagtaattttggttgacgggtctaattggtgtgatggtatgatagattagactataaaaaatcaggaagtgtttacatgacaatgaaaaagttagtagtagcaactggactttcgttcgcgcttttagccggatgtcaggcaggagatgaagaacaaacgtctaacgagtcacagaatcaggcggagaacggtggacaaacgaataacaactccacaaataattctgggaatgccaacgaaaatcagtctaaagaaaatcaagaaggcgatagccagaaagaaaatcaagatagcaataaagagaaggatcaaaaagatgagaatatagagggtgcagcagcctatccaacgatggctgaaacagtagagaaaaatggtgagaatctaacggtcacgaatccagacagcatttatgttgtggctaataaagaacgtaatctaccttctgactttgttccgaaaaatcttgtggaaccagacgtctctacatatgcccctgaaggtgatccgaagcgtttaatggttgaagaagctgccagagcgcttgaaaaaatgtttgaaggtgcaaaagaagatggctatgagttaaaagctgtttcaggttatcgctcctatgaacgccaggaagctatttttgcctataatgctgaacagcgtggagaagaagtagcgaaccaggtaagtgcacaggcgggacagagtgaacatcagacgggattaacgatggatattagcacgccttcccttggtagctctcttacagaagagtttggtaacacaccagaagggacgtgggtagcggagcatgcgcatgaatatggctttgttgttcgttacttaaaaggaaaagaggatattacaggctatcaatatgagccatggcacgttcgctatgttgggaaagaagcggccgctgatgttcatgaggctggcgttacgcttgaagaatttttctctgaagaaaaatagttatggaatgttcatagtttgaataagataaatcgtttacaataaaggttgaaaaggtaaccacatgcacatgataagatcatgcattagacagggagtaattcaatggcagatttgaacttgtttttagcgttcggtgccggctttttatcatttatctcaccgtgtgtactaccgctttacccggcgttcatttcttacatcacaggggtttccgtagatgatctgaaagaagaacgtggtatgatgcaaaagagagccatatttcatacgattttcttcctaattgggttttcgattattttcctagtgttaggaatgtcaacgtcccttgttggaaatttgtttattcagtacaaagagcttctacgtcaagttggtgccattttaattgtggtgtttggacttgttgttgttggtttttggactccgaactttttaatgaaagaccgtcgcttaaaaatccgcaaccgtccatctggttttattggttctgttttcatcggaatggggtttgcggcaggctggacgccttgtacaggcccgattttggcagctgttattgctctcggtgtttctaatcctggagctggactcatgtacatggtagcgtatacgcttggtttttccgtgccgtttttcattttgtccttttttatcggcaaaatgcaatggattaagagaaatagccgattgattatgaagactggcgggtatttaatgattgtcatgggcgttttgctttactttaacttcatgacaatgtttacatcattccttgtaaataacctgtttggtggctttcaaggattctaattaagaaaggatgcgttggtttgaaaggaacaaatgaccttatacttaaaacgacgacaaccattatcgtctttattattctaggattttcgatctacttatttttcgcaggtcataatgcaccgggcgggggctttattggaggtcttatgactgctggagcattggttcttctgtatatctcatatggctttaaaacaatgaagagagtgatacggattgactttaagaactttattccgatcggtctattgattgccgttcttacgggagtaggttcgttcatttttggtcaacccttcctaagtcaaacggatgcttattttgagttaccgattctcggacattctcaccttgcaaccgcaatgctatttgatcttggcgtttatttcactgttgttggggtaacaatgacgattattttaagtattgcagccgatgaaggagaagtggagctttccaaattaaatggataaggaagaaagaacggtggaatgccgttctttttttcgtgagcttgtatttttagtctcttccacatacaatggaaatgatgggtagtacggtataggtgagggatgagtatatgctgattttaagtacagttgtaggagcgatgatggctcttgcaatggtagtgatcaggttgaaagcttcaaaaaaacctgcaacgataaggaaaattatacttccgccgttttttatggcgaccggtttttttatgtttgtcgttccagatgcaagggttccgtggtacgaagcaattgaagcgctatcagtaggcgcagctttttcgctgttgttaattcgtacgtcgaagtttgaaattaaagataatcagatctatttaactcgttcaaaggcatttgcgtttattttgattggactactattagttcggattattttcaaactaatcattggagaatctataccagttcttcagacgagttcgcttttctttgtgctggcatttggaatgattgtaccgtggcgaatctcgatgtattatcagtttaagaaaacagagcgaagtagaacgcatggaacaacacttcatcaaacattactataaaaaactcgtttagcatatgctaaacgagttttttattgaagcaaatgatgataaggagtcatatcgattcgcttttcattcagtttttttacgagccacttgtgatctcgtttcggagtcgcgataatatatccccgaatgattaaatcttgagacatgttttttgctttttctcttagcgcaagctcacctattgttcctgcgattttatacttcgcaatatctcgaaacaattcaggaacaggcgagaccaattcatctaaaagtttcttctgatcactgctccacatatgctttgtttgttcaatatagtgttcttgccagtcgagaatagacttgccatcttctttaggaaggcgttttaaaaacttccgaaacataaagaacccaccgattgcaatcaatgaaattaagattactgtccatccgacgataaaccactggaaccatcctgccaacgcactcacctcatggcatcataatataattggttgaatacggtcacattatacgccgaaagcgctttttaatcaagaggtatcgggttacgtttaacgggccaagaaattggagtttcatcatcctaaaactagatggggatccactagcaatctgaaagtgcgtagattgataaattcaagtagatcaacgctcttaactgtgtaattaaaatactcttgcatttcaattttgatattcaagaatacataaaaatattgtctttgctaagaagaggggaggggagtgacagcaacacaggcatcatcaaaaatatgagcagcttctattgtaagagtagcggaatagatagcattattgtgttataaaaaatgttgtgcagtcgatgtagttttgatggtggagaaaatgctcgataagattcctgtcatatgaaaatacattcggtttatcaagacaagtttacaagttgtacgatatgtaaactgatgataaatgaaaatataagagagaacagtgaggagaaattgtaaactttataagctgaatagatcgtaaaaaactagttataaatctcgttataaataatgtgcttcagccagaaatgactgacagaataaatgaaggggtgctggttattcttgcagagcgatttgtggagttacgatcatcttgcaaatgattgaaatttaattggcgggactgtgtgggaatcgaacccaccgaagacggcacgcgcctcccaggcggttttgaagaccgtggcactcaccagacgtacaaccagccccgtaatataatgtacttttcatataataaccgaatgaatagaaatattcaacgcaagtgctcaaaatgattatttcagaaaaatgaatagtaaactttgtagtaaatttttactttaagacgattgcgtagttcctcttagcagaaaggtgtcgaataaagtctgaatgcagtataagtagcttgttcttttgtgaaaatcgacaaaaatcgttttattttacgaaattcgtgttttcgacaaattaaccaatagaacagttttctataacgaactgatacagtttatcgagtgatacagatcgtaaatagagttataacagttgtggctgtggatagctgtgaataacttttttcaccatacagcattgaataaatatacaggggtgtataaaaggaaattccaccattcttttaaacgcaatggtttaaatttgcatcctgtacctacatttattactgttaatagaagatgacaggtgataggcaggtgtaagcatgaactattatacgattggactagcaggccacattgaccatggaaaaacgacgttaacaggcgcattaacaggtgttgatacggatcggttgaaagaagagaaggaacgaaacatttccattgaaccaggattcgctccgtttcaactatccgatgacatgaaagtctcgatcattgatgttccgggtcatgaacgatttattcgccaaatgattgctggggttgctggtattgatctagttgttccagttgtagcggctgatgaaggagtgatgccacaaacgcgagaacatctagagattttatcgcttctaggtatccagcgatcgattattgcgatcacgaaagcggatatggtggaggaagacatgctttctctcgtgcaagaagatattcttgaatacataaaaggaaccgggtttgaaggatcaaagattcatatcgttgatggcaaaagtggaagaggcgttgctgagcttaaaaatagtcttcactcttttcttatcaacacaccttcaagaaataaagctggagcactgagattaccaattgatcaagtatttactctacaaggccacggcacgattgcacgaggaacgatttttgatggagagcttaaagaaggagaacttgttacactacttcctgatggcgtagaagcgcgagtaagacaaatacaaacgcacagtacaaaggtggagcgagcttttgcgggcgagcgagttgcggtgaatctggccggaccagatcggcaacagatggttaggggacaagtcattgttaattccaatcactatcctgttacgtcgaccattgacctttcatttatgaaagctcttacgatggctcatgacttgaaacagcgagctgaagtaacggtacacattggaacggctgaggtaagaggaacgattgtctttttcgatcgcaatacgcttgaggcagggaatcgagaagaactcttctgccagattagactccatggacctattaccgctaaaaaaagtgatcgcgttatcgtaagacgtccttctccggttgaaacaattggaggcggcagtattcttaatgtggcaggagagaaatataaatttggcgctgaaacaatcgcgaaatttgaacaaatgatgaaagggtcgccagctgaacagcttgagcagattcttgaatcagagcaactgctatcaaatgaacaagttatgcagcaaatcggtttaaatgaggaagcgtttcgccagcttaaggatgatgatcaccttgtctttattgacggtggtgtaacttcacaaaatgtttttacgcgagttgttgaagcgattcataagaatttggaagcggcacataaacaatttccaatgcgaaaaggtccacggaaagcggaagttgtgcaggagttaaagaaaacttatcctaaaaaagtaatagatgccgtcttgagcattcagcttcaggaagagttgcaacaaaaagggccatttctttccatgcggacttttcagccatcgctaccagccgcatggaaagcgcgcatgacaaaggtgctgaagcatttagaggagcagggtattaatgtttcgccagtggatcgtttaatcgatgagcagcaaattccagatccatataagacggagcttaagaactatatgttggaggaagagattgcagttaaattaacagacgagctttatgtgcatgttgaaagttggaagcaaaccattgcatctttaaaagcggaaacagatcaagcctttacgttacaggaggcgaaagatgttcttaatgtaagtcgaaagtatctagtgccgatcctagagaagcttgatagcgaaggatataccgtaagaaaagatcaggagagatattggagaatagagaaatagattgaaactgaggagtggagaaacatgaaaaaagcgattctttttataatggtgcttatgctcggcattcttgcggcatgtagctcgaatgagaacgaaaatgcttcaaaagataatagtgaaaaagaagaaggtgcctttacgattggtgtaatcccagttcaaacagaaggtgaaattgaagaagcgatgacgaagcttcaaggtgagctttcagaaaaacttgatcgtgatgttgaaattacaacgtttcctgactataacggtgttgtggaagcgatgaactatgatcaaattgatatggcttattttggtccgcttacgtatgtgattgcgcacgagaaaagtggtgcgaaagccattgtgactcagttgatcgacagtgagcctttctaccattcttacatcattacaaatacagaaaatgagtgggagacgcttgaagattaccttgaaaatagtaaggaaagaagctttgcatttggcgatcctaactcaacatcaggttcattgattccttcaatagagctccaagatcgcgatgtctttgaagatcaggatacaaatgattttgcttctgttgcctatactggctcacacgatgcaacagctttatctgttcaaaataaacaggttgacgcaggcgcaattgatagtgcgatttataatcagttgcttgaatcagggaaaattgatggagacaagcttaaagtgatatgggaatctgaaaagcttttccaatatccatgggctgtttctaaaggaacggatgaagaaacgattgatcagctacagaatgcatttctagctattgaagatgaaacgattttaaatgcatttggggcatcaggatttacgaaagcaaataacgaagattatgagagcattagaagcgctgctgaaaagcaagggttgttaacgaagtagaatggcctggtttaagtggaagcaccttattctattttttatggtcatcggattaatggcgtggagcatagatgttacggagtttgatgtaaggaagttcagtcaatttaacaatatgatcgattttctgtcgaactggtttccgttaaatacatcggtgcttccaaccatgttaaaagcaagtcttgttacactgggaatggcgtttctaggaagctttgtcggcttacttgttgcgttacccgttagcttacttgctgctaaaaatacggcggggccattttatgggcctgcgcgtgttggtttaagttttgtccgttcgattccggaaatcgtactagggttaatgttccttacgattgttggacctggaccatttgcggcaacgattgcgatcattgttcataatgcgagtgttctctctaaattaattgcagaattaattgaagcggctgataaaggcccacaagaggccatgaaggcagttggggcaagaccgctaacaggcgcgctgttttcagtctttcctcaaatttggccaaacgtcctgtcacattatttttatcgatttgaagttgcgattcgaacttcgttaatgctcggtttagttggcgggggaggaattggacaacagctgtttgttcattttaaaacattccaatactcgaccgttgcggttgatgtgatgctgattatgatcattgtcattgttgttgattttctcggaagtagggtgagacaatatgtcatgtaatgaagcgttgttaatggttgaaaatgcatccgtgcgctatcaaaatgctgaatcgtatgcgttggatcatgtttctctcacctttcaaagaggcgaatttgtttgtatattaggaaaaacgggcgctggtaagtcaacgctcattcggacgttaaatggcctgcagtctttaactgaaggggacattatttataatggtcgttctttccaaacgctcgatcgagaagggttaaggagacaaaggcgaagtatggggatgatttttcagcataatcagctgattcctcgtttaacggttaagcaaaacgtctacacgggtttattcggttctcgatcaaccattcgcaacctcgctggcttattcaatgaaagtgaaaaaaaacttgcgagagacgttatcgaacaagttgaactgctgcctcatttaaataagcgggtagatttattgagtggagggcaaaggcaacgggtcggcattgcccgagcgcttgcccaatcgcctgatgtttttcttggagatgagccagtagcaagtcttgatccgggtacggctaatcgcatttttcaactcattcaccgtctgcatgaggagcggaacttattaacgattattaacgttcatgatgtaaaactagcgaaaaggtacgcgtctagaattgtggcattaaaagaaggtcgcgttgtatttgatgaccgaccagaagcgcttactgaggaattagaagatatgctgtatgaaatataaaaaggaagttggggatttccccaacttcctttttatttgcttgcggtgatcgcaaatgcatctttttcatttacatgaccgacaatgtaagcagatttccctttggtattcatccgtgatacatattcattcgcttcatgctcaggcaagctaattaataggccgccagaagttaccgcatcacataaaatgaactgctcaagttctgttaggttttcgtatctgacagattcagcaatccagcggtgatttgcttttgatccacccgggatataaccttgctccgctagctcaactgtgccaggtaaaataggcacgttgttatagttgatctgaatgctaacgttgcttccagttgccatttcataagcatgtccgagtaaaccgaagccggtaacatctgtaactgcattaggtgataaaccagatagttcttcggctgcggttttgtttagctcagccatcgtttctgatacgcgctgaagctgttcagcggttagcttttcaggtttaatggcagttgtttgtatgccgacgccaataggctttgttaacaccatcgcgtctcccggcttggccccaacgttcataaggatttcatttgggtgaacgagacccgtcacagataaaccaaacttcggctcctgatcatcaattgagtgtcctccggcagtaacagcccctgcttcatccactttatcagcagcgcctttcaatatttctgcaaggatggaagggtctaaagatttgatcggaaaaccgacaatattaagaacggttttcggaactccacccattgcatagacatcgcttaatgaattggccgctgcaatttgaccaaacatatatggatcatcaacgataggtgtaaagaagtctaccgtttgaatcatggcgagttcatcagttaggcggtacacgcctgcatcatcggaggtttccacaccgacaagtaaatttggatcttttttcttattaggtaattgacgcaaaacttgcgtcaggtcctcaggaccgattttgcatcctcaaccaccttttgtcgatagggatgttaaacggatgttttcttgatttgacatataaccacctcctaacatgagtataaatcttttcatcgtatttttgaaatgatatagtatgtacaacttgaaattcattagaggaggtagcctatatgaagtatcatgtaacgatcgaattttgcatgcagtgaaactatgctcctaaagccgcgagtttcgcggaagcattatttaaccatttcagacaggaaattagttcactagaaatgataccgggttctggtggtgtgttcgaagtgacaataaatgatcagcggatgcattcaaaaaaagaatcaggtcaatacccggaagtagaagcatttattaagaaaatggaaagcagaacgttcgagtagggcaccccgttgtagggtgcctttcgtttcgatataggagttgagattttgaaattacttagagaattacccccgattcatcaaattcaagatgcgatgctgaaagagaacattgggagcgacctctctcagaagcttctcaaacaaatggtccaacaggaagtgaacgagcttcggagcgctttaataaaggaaacgtataccggacatgctcaagatcgccatggttttcaagttgaaattatagcaagcgtgcaagaaaaattaacgcgaaatgctttcaatttagtgccggtaattaatgcgaccggtgtcgtgctacatacgaatcttggaagagcgagattaagcgatgctgcaatagatcatatgattgaagtagccaaaagttattccatactcgaatataaccttacacaaggaaggcgaggatcccgacataccattgtcgaagaagcggtttgtaaggcaacaggggcagaagcagctatggtcgtcaataacaatgctgcagctgttttcttgattttgagcgcccttgcaaaagaaaaggaagtggttgtctcacgaggggagctcgttgaaattggcggatcctttcgggtttcttcaataatggaagagagcggggcacgcttgaaggaagtaggcaccacgaataaaacgcatcctgctgactatgaacaagctgtgaacgatgaaacggcgatgttaatgaaagtgcatcgtagcaattttgcgattgttggttttacggcagaagtagagcgcgagcaattagcatccattgcaaaaaaacaacaggtcattttttacgaggatttaggaagtggcgcattatacgattatcgaaaagatggtattggagaagagcctactgttcaagaaacgcttgctgctggtgcagacttagtatcctttagtggtgataagctccttggtggtccgcaggcaggtattatcgctggtaagaaagaccttgtcgatcggttgaagaaacatcaacttgcacgtgtattacgcgtagataagtttacccttgctgcacttgaggcaacattacgcgagcatttatatgaagaagcaaacaatatccctgcgatcagagatattacggtatcggcagaagaggtgcgaaagcgtgcacttcagttcaaagaacaacttgaaacgaagtgttcgcattatcaaattgatgtggaagcgagtgtgtcccaagtaggtggcggcaccatgccttctgttgaattgccaacctctgttgttgctattcgaacaggtcatttcagtgtgaatgagcttgaagaaaagctccgactgagtcatcggccaatcattacccgtattaaggatgaaaagattctcattgaccttagaaccgtaacgacagaagaggaagaagtgcttttaagcgtattgatgagcataaataacgagtaaaaggcggccgtctctggccgccttttgtcatagagttttagaacccttcaccatttttttgtctcgtatggtttctgtttttaactttatgagaccctttcattggttcaggctgaccagtgtggcctttaggagcgtttttacggatgtctttaaacgtattactttcagtcataatcatccctccttaattcttagtatggacaggtttatggcccttattcttatcgaataggacgtcgttacctggttacactatggtgaaagcaatagaaaaggaggttaaatgaatgccatataataaagataagcaacaatcatttcaggcggctcagcagggatatgaacaggcagttgatgctaaaaaagaaatcgttgtaagtagcagtggttatggaaaagacttaaaacaccttcagcaagaagttggtgaggcaaaacagcagatcgaaagcgcgttagtaaacgcatctgaacatcagcgcacgcagttgcttcaattccaacaggatctgcagtccattgaagcagaaatgaacaacgagtgacattaaaaaacccgtcatccaattgtgacgggttttgcttctattggcgtttttttgtctttttgttgtattgtttctgttctgccgtcatatgctcatgcgcatactcattatcatagccagcaccgtttccctgtgcgtcagcatcattcatacctgggcgtacaccatttgctttacgttttcccaatgtcatcacctcccttgttctaacatgtcctgaacaggcgaaattatgtggtgataagctatacttatcaatagcaataacaatcttgttatttacttatgtttagaaatttactaaactggataaagggaagttgaaaacgttttttcgacatccgctttgttatgcaatttggaggagggaactacatatggcaaatcacgaactttataattccaaagcaacattcgatgccaatggtaaatcatattccttctatcgtcttcaggcgttagaagaagcaggcatcgctaaggtaagcaagctcccttacacgatcaaaattttacttgagtctgttttacgtcaatatgacggtaaagtgatcaaagaagagcacatcgaaaacctcgctaaatggggaactagcgagcaaaacaaagatattgacgtaccatttaaaccttcacgcgttattcttcaggatttcacaggcgtaccagccgttgttgaccttgcgtcacttcgtaaagcaatggcagatatcggtggcgaccctgacaaaatcaatcctgaaattccagtggatcttgttattgaccactcggtacaggttgataaatatgcatctgatgatgcacttgaatttaatatgaataaagaatttgaacgtaaccttgagcgttataaattccttaaatgggctcaagatgcatttgataactaccgtgccgttccaccagcaactggaatcgttcaccaggtaaacctggagtacgttgcgaacgttgttcaagaaaatacagttgatggcgaaaatgttgcctatccagatacattattcggaactgactctcatacaaccatgatcaacggtcttggtgttcttggatggggtgttggtggtattgaagctgaagctggtatgctaggtcagccttcttacttcccagttcctgaagtaatcggtgttaagcttactggagagcttccaagcggaacaactgcaacggatttagcactaaaagtaactcagcttcttcgtgagaaaaaagtagttgggaaatttgttgaattcttcggaccaggtctatctggcatgccgcttgctgaccgtgcaacgatttccaacatggcaccagagcaaggttctacatgtagtttcttcccagttgatgaagaagcgcttgaatacatgcgcttaactggtcgctctgaagagcacatcaaccttgtgcgtgagtattccattgctaacggattgttctacacaccagaatctgaagatcctgaattctcaagcgttgttgaacttgatcttggaacagtagaaccaagtcttgctggtcctaagcgcccacaagatctgattcttctttccgatatgaagaaagagttcaataaagcagtcgttgctcctcaaggtaaccagggtctaggtatggataagaaagaattcgataaggaagctgttgttaaatttaacgacggaaaagaagtaacgatgaaaacgggtgcagttgcaatcgctgcgattacaagctgtacaaatacttcgaatccatccgttatgcttggtgcggctctacttgcgaagaaagcagttgaaaaaggactaaaagttcctgagtatgttaaaacaagccttgctccaggatctaaagtcgtaacagactaccttgataagtctggtcttatgccttaccttagagatcttggcttccaccttgttggctacggctgtacaacttgtatcggtaactcaggtccacttaaagaagagattgaagatgcgattgcgaagagcgatcttacagtgacttctgttctttcaggtaaccgtaactttgaaggacgtatccatccactagtaaaagcaaactaccttgcttcaccaccgctagtagttgcttatgctcttgctggtactgtagatttcgaccttcattctgattcattcggtaaagataaggatggaaacgacgtttacctaagcgatctttggccatcacctgaagaagtgaaagaagctgttgctgaaacagtaacaccagaaatgtttaagcgtcagtacaaaacagtatttgacgaaaacaaacgctggaacgaactaagcacaagtgaaggagatctttataactgggacgatgagtccacttatattcagaaccctccattcttcgaaaatctttctaaagatccagaagacattcatgagcttaaagatctaagagcaatcgcaaagtttggtgattccgttacaacggaccacatttctccagctggtgccattgcaaaagatatgcctgcaggacagtatttacagaataacggcgttcgaccaattgactttaactcttatggatcacgtcgtggtaaccacgaagtaatgatgcgtggtacgtttggtaacattcgtattcgtaacgaagtggctcctggtacagaaggcggatggacaacgttctggaacactgatgaagttatgccgatctatgatgctgcaatgaagtacaaagaagaaggaacaggtcttgtcgttcttgctggtaaagattacggcatgggaagctcacgtgactgggctgcgaaaggaacgaaccttctaggtattaaaactgttattgctgagagctacgagagaattcaccgtagtaacctggttctaatgggtgtgctcccacttcaatttagagatggtgaatctgcagatacgtataacctcacaggtaaagaaacgtttgctgttgaaattacagaaaacgtaaagccacgtgatgagattaacgttacagcaacatctcctgaaggtgaaacacaaacatttaaagtacttgcacgttttgatagtgaagtggaaattgactactatcgtcacggcggtattcttcaaatggttcttcgcgataaaatcgcaaattaagttagaaaaggatggcaaatgccatcctttttttggttattacgacattatcgatacaaaaaattcattataataaacaaaaaaatcggatttttgtaataagtttcaataaatcgggaataatggttttaaatactgttgaagaggaaaggagacttatatgagaaagtctaagaaggtgtcatttaaagaattggtcatgcaaaataaattggaattaatgagtgacaagaaagcgattgaacggattgaagataaattcgaacaaaagcatgcaaaaaatttgtaaacgggtagatatttctcctctagttgcacagcctatagcgtaaaggaggagattaatatgagtaatccaaaaaagttccctaaatcatttaagcctaatcacctcgcttctgtgaatcctgaagcagaggggaacaaaggaaaacagatgcaaacgaaaggaaacgctgaaccggactacgcccctccaaaagggaaataggctgatgacaaccagaaaggagctctctttctggtttatttcaattttaacaacttcttttcatttcatgtaaagttgtccaaaaggatagaaaggttgcgaaagcttaggagacaaacgttttcggggggaacattatgacaattacagcaagaattgaaccaatcacagctaagggcagtgaagcagagcgaaatgaagatcttcttgtaaaagaacttgaaataaaaatgcagcaaatgggttatctcgttccatatcgggaagagttaaattgggatcgtaccattgcaagtctcgagttaggagaagcgcaaactcttcaccaattgaaaaaagcagcagccaaaaatgatcgcgtccttctcatatatgcacgtttatttaaagggacaatttttcaacaccttattcttcaccctaaccagtccggtatctatcttccctttcgatttgaagaaccatttgtgttacaagtagaagggaaaaaaatatggattggttcttctgtaaggcttcttgaggaattatcttggcttcaaattagctttgatcaaggaaatcatccggaaagtgtgaaagaatactggcagaatctaatcgagatttcaaaaaaaagcgtaacgtacatgagcccgattatttttgaagaagccatttagaagattttagtagaagaagaaagggtatgggattataggagaggtgatagaagtggatcataaagaagagttaggtagtgacatttaccggatgcttgaagcatcggggccaccttatggttgtggaactgcatcaatcgtaggtggttttgcagcgaggcttgcggttatgagccttacaatttctgatatcgagcacgacctacatgatgtcccaggatcttttttccttatgtgtgatgaagatgaccgtgaatttcaatcttaccttgagggaggaggcaatcattcccctaatgacgtaccgattcgattattagagtgcacgtatcgacttctcgttgaattatcttcgtatgaagatcaaattcaggaaaacgttgtagtagattatcgtatgggtatacgtatgttgaaacaggtattcacagcggctgaaaacatccttcttaataatgggtgttcacccgacgttcggaaagagatgttattttatgaagggaagctagaagggaccttacctaaaagtctccagtcataagcgcatatctcatgaatatgtaagccataataagctcgtaacaccttgtcatttcacttataaacagggagggcttactttgaaagcaaatccagatgatcgtcgagataacgcagaaaaattaaagagtatggtacaagacacgattgagaacatacacgatgctgaggcatctttagaacttacggatagcgatatacaaaaaaaggcgattaaagaaaaaaatcagcgcagaaaacaaagtattgagtcaatgagaaatgaaattaaagatgaatctaaacaataagtagtttaaggactgaatgacaaagcgtcattcagtccttctcattcatgcttcatgggtggtttatgataaaataagattgacaccacgttgaagttaggagaggaaacaggatgtacataacaactacgtcaatagatgttcgatatgcagaaacagatcaaatgggagttgtttaccatgccaactatcttatttggtttgaacttgggagaacagctttaataaatgatttaggatttcggtacgctgatatggaaaaagaggggattctttctccggtcatggatataaaagcaagctacaaacgtccagttcgatatggagatgaagtgagagtgaagacctgggtggattcttatgatggtcttcgcgtcaattatgggtatgaagtaatcaatggagacggcgatatttgcgtgacgggtgaatcaatgcatacgtgtgtgaagcgagatacgttccgtcctgtatctattcgaagaaagttcccggaatggcatcaggcttatgaaaatgccaaaaagcaacctgcttctactggagttgaataatggcatttggtttgtcgaagggtgagcttgcggaatggaaagcaaaggttaaaagtggagaaatcgctttattaactcatttttggtatgatcctcgttttccgcaatttcattcggttacaaaagcgggatgtagcgataaagaaaagcttgcaagatggggaaaacagtatggtttaaagcgagaatggatgcacgaccgggagatgtttccgcattttgacttgcttggagacgatcagattcgcattcttgaacaagaaggtttacgctctcacattcagcgatttcggttaaaaaagatctattaaaaaaacgcgaaagcgagaagctttcgcgtttttcacatcaatttccgtgtacaaactgaatttcttctttatttcgactgaatttaacagtgaaatcttgatcttcaaagaaccagatgtctttttgttctacaaaaaaggtaatgccttcttcttcaagcataagagcaggctcagttggctcttcaacagtcatgccaagtgaaaatccatcttgtacagtactgcatccacctacgcgtacaaaaaagcggagatgatcccctttttcaagatccatttctcttttaaaccagttcaaagccggttttgtaattgtcattttcaagtttcatttcctcctttgccgaacgggtctactcgtactattataaagaagtagcgggaacttgcaaaaagaaaaaggttatggagcgaaaaaaatggcaataaacccatttcgtgaattgaagcattttgtattttgcgttaattcttcatacaataagggtataaaaggaaatgtaatgaggaggttgttaaatgaaaaaacagagagtgtggctgtttttattcctcattcttgctggaggtattttattaagcattaaaccaataatggaataccgcagtcagcgtttgaatgaaataaagcaagcagcatccatgatggtgatgagtgaagcaccaaatgaaaccgtcatttcatcaattgcagataaaaatgatcaagctaaaacggatatagaaccagaagtgactgcaacaactgaagaacaaaagcctgaggaaattgaaaaagcagtaacagatccagatattcgaatcgtaggcctcggtgattctctcactaaaggtagtggggattcgacggaccaaggatacatcggaaggcttgctgcgaatattgagcgtgatacggatacatcgatattagttgaaaattacgcagttcatggtagacaaactcctaaattatataaaatgttggtagaaaataatgctaaagcttcgcttgcagaagctgatttgatcgtcatgagcattggtggaaatgatttaatgaaagttgtgaaagaacattttctagacttacagatcgatgtcttccagcgtgaacaaacaagatacgttgaacgacttgatgcgattatgaaacgtatacgaagcatcaattctgatgcaccgattttgtttattggcctatataatccattattagagaattttcaatcggtgacggaaattgatcaaattgtacagaggtggaatggcgcaagtcaagacacagtagagaaggataatcgtacgacatttgtaccgatatatgaactgtttagttcagttgatgagaatttattttttgaagatggatttcatccgaacgatcaaggatatgaactcattgcaagacaaattcaatatcgattgaagcaagacgctatcgtcgaacaaatcccctttgaatagttcgtgtacgagatgtccgccttttgatagaatagtagtaagaatggatagagaaaaggaaaatgataatgaagcgatggatgaaatggcttttaattaccctcacgctctttcttgttgctggagcgggggcattaacttatgtttacttcaacacgggttcactcccagaacaaacgaattcactcccattgagtgataaaatacaagaagcgtttcaagagaaacctgagctcgatgagcaagtggttcaaatcgtaggacttggagactccttaacaaaaggggtaggagaccaggggaaagatggctatatcggctatgtaaatgatcactattttgaaagtgatcaaaatgcgactgtcacgcttaagaattatgccattacaggaagtaaaacagaggatctgttgaaacggcttgaacaagaaactgtgcggaatggggttgagaaggctgattatatctttttaacgatcggtggaaatgatctttttggtgttgtaaaaaatcactttatgaatttggatcagcagtatttcacccttcaaaagaaaatctacctagaaaacctgacgactattttagctactatacgtaaccttaatcccgatgcgccaatttattttacgggtttattcaatcctttttcgaaagcatttggggatattcctgaaatgaatgaaattgtggatgattggaatcaaggaagtcgctcaactgtttcagatacaactgatgcaacatttgtacctgttgctgatttgtttcttgaaagtgatgaaaacttattatacgaagacgctttccatcctaatgaagagggttatcatttgatgggagatcgaatagtttcttatttaaaagaaaataacgtagcgaatcgatgaaggcagggaatggtttatggatacatctgaaaaatttgaacagcaatatcaagcacttgcgaaaaattacgaagtgccagaggtcatctcatcgaaaacaaagcttatttttatattagaatctccacacgtagcggaagttaaaaacggcgtacccgttgcaggtccttcaggtgcgacgatgtcaaagaagcttttcgggccagactatgcaaagcctcttggactattattgaaaaagcaccgagaagaagagttggaaagaccttctcttgatgtagtcggtttgttaaatgtgtgtaatataccaatgcaagcaagaccttatacctctgaagatctagaaagcaaccgtgagttactagactgtctcggcacaattcgaacaactgcaaagaaaacgccttttaaagatgaagcattagttaaggttaatgaacttctcttaacaaaattcaaaaaccgtttgatggaactgatcgatcgagaagtgacgctcgttccctgtggacgatttgctcaaaagtattttgaactcgcaaatgtatcgagtgataaatggacgatagtgcacaacgttcctcatcctagctacaattcttggagtcgtgagcgttatcaggagcctgtcaatagggtaattgatgcttttaattgtcataaaatataaggatgtttattgattagaacgaaaagccccattcgaattcgaatggggctttttctatgaaataggagagcagatagggcgaatgcataaatattggctccgttgtaatataaatgtaatgaaaggagggttgacatgatgaagaaatgggcagctttacttctcgtctcgttggtatttatgagtggatatgcgatcaccccccataattcaactgaaatgattcaggcttcagcttatgttgttcaagatgaagatctaccttattgtcattaattaatgaaaaggggtctgtcgtgtgtctgcacctttccaatttattttaaacagaatgaatagtccatgatctctttgaaaggaggacatgctatggaagaactcacattgtttattacggcaggacttttcttcgtgtctctctttaatttcatcgttatcttgatcgaaaaaacgaagcataaataatctacgcgttttgaatcattccaattttctttgcataatgatccacatgttctttaaagagctgattttgatcaagttcaaaaatggtggaggctgtcgcgagatattcataagctaactcttgttttccgagtagatagtgaagcttgccacactgatagctaagttcgccaaaaagatagaggcgctgtttctcgcgacaaagtaaaaatccttctcgtgcaatggacagagctttctcgtagtttcgacaagtggatagtgctttggaataattataatagagacggatttcaatcgtttcatcattaataatggggaaaaagcgaacatgatagagcgctttatgaaataacggtagcgcgcgttcccaatctttttcctcactatacaagatcgccatgctaatgagtagttcaatttcacgttctgagtaattctttgaagtagtcgttgtaaggcgtagggcttcatctagaagctgaagtgcagagtgggggtctcgttctaaataataggtgcaaatggctttgtgccaaagatagaattgtttattttttactgttcggaaaagggggttcgcttcttctgcttcaagtatttcagcaactacacgatattcgcgccgtttaatgtgttttctaacctgtcgaatcacttcattcacataatcaaggcgaggtgtctctttcatgtgaaaaaaataattaatatcaacacctagtcttgatgctaattggtaaagaagctcagcggagggtgatacatcattgttttcaatctggcttattaacgcttgtgtacagatgccttccgataaattggactgtgatagtccaaggtacattcgaagttcgcgcaacgcatatccgagtgtatcctgacgcacctgcaatccccctttttttgacctcattgtatcatgaatttctttttaatacatatttttctaaatataaatacaataatattattatgtaaactgttgtgtgtgcaggaattttgaacttggtcgagaaacctcttaatataaggctgagttagctgtataaagaggaggagaaatgttgtcttatttaccatcatttgaattaaccaatcaagtcgttgtcgtgacaggtgcaggaaaaggaattgggagagcacttgcgataggagcggcagaagcaggggctgatgtagtggtcctagcaagaacagaagcggatattcaggaaacagctggacttgttagcgaagttggtcgaaaggcttatcccattcgagttgacataacaaaagagagcgaactaacagaagctgttcaacaaattgaaaatgaagcgggaaaaattaatgtgttaattaataacgcaggaatgaatattcgctcgaaagcgagcgatgttacggaagtggagtggacgcaaattctccaaacaaacttgcagggcgctttttttatgtcgcaaaagtgtgcagaagtaatgaaagaaggtggagggggaaaaattattaacatctcttctgttgcgggacacgttgcgttaagaacaggggtcgtatacgcagcatctaaagcaggtatgattcagatgacaaaaaaccttgcactagaatgggcagagaatggtattacagttaatgcgattgggccatggtattttcggacaccacttacagaaaagttactgcaagatgagcagtacttagcagatatactaaatcatactccaatgaaacgagtgggtgaattaaaagatttagttggagcagccgtattcttgtcctctgaggcatcaaattacataacaggtcaaacgctgtttgtagacggtggaatgacgagctatggattttagaaaaaaccgttactcagctgagtaacggttttcctattaatcgaccaaatcagctgaaaagcttggcgctgtaaggccagtatcttcgtaaaccgcagccattttttcttcaaaagaagcgaattgtgcatcagattcttcataagttgcttcaggctcgtcagaaagattagcggcacgtgtttcataagatttagcaagatcctctaatgctgcttcaatgtcacttttgtaagtgtccagctcagctgggacttcgacagcacgaacatcttcagcaacggttttagcagctgcttcagcatcagctttcattgtagcaagctcttcatcagacggtttttcttccgcaactttagcagcttcaaaagcgtagatagggctatcattcttattaattgtttgaattaaattcatttgaaagtcgagaagatcactctttacatctgtttcactagcatcacttgcttcttctgtgcttcctgaattcttcgtagcgtttgaactgctatcgtttgcttcattgttgctacaagcagctacaaaaacgaaaacaagcagcatcgccaggggtaaaaatcgtttcattcaaaaccctcctaatttttagaaaactctctttcgaatacaaattttagtgtattcaatgccgtttgtaaactaaaaaaagaaaattttggcataaaatgtaataagtaaaactattcagaaaaatacagatgaagataagcttttacatatgttatggtgaagagggaaaaaaatggctagaggagttggcatgatgattttaataaataacgatttaatgacaagagatcaggcaacaatagatattgaagatcgaggttaccaatttggtgacggcgtttatgaagtcgtacgaatttacaatggtgtttttttcgaattggatgcacaccttgatcgattagaaagaagcgcaggtgagattaaaattgttttaccatttactcaagaagaactaaaagccaatttaaacaagctcattcaacaagttcctgtgcaaagtgggcatgtttacatgcaggtgacaagaggtgttgctccgagaaatcatccgtttccagccaagacagaacctgtctttgtagcttatacaaaagaatacgagaaagagccatcacgctcaccaggacgagctgttttcacagaagatatccgctggttaaggtgtgacattaaaagcttgaatttactcgggaatgtacttggaaaacagtttgcaaacgaacagaatgtcgatgaagcgatttttcatcgcggggaatgggtaacggaaggaagttctacgaatgtatttatcgtaaaaaacaacgtgctttatacgcaccctgccaaccattttattctggatggaattacgaggaaagttattctttccgatgcaaatgaactgggaattcaagtagaggaagaagcgtttacaaagcgagacctacttaatagtgatgaggtgtttatctcaagtacgacgcaagaagtaaggccgatagtagaagtgaacggtcaaccgattggaactggaaaagaaggcgagataacttcatctcttcatgcgaaattcactagtcgtttaacgtgatcaattggttaaaacgaaaatcttttcatttgtttagttgaattttgcacgaaacagtggtactgttaactttggctatatgtgaatgaagagttgcttgttccgagcgttttccaacattaggaaaatgctttttttgaacattatcaggagatttttctcccgtctatagcatttaatgcattttaaaagtaaaaaggagtttttaaaagttgaaaaaatttcaagatctaggtttaagtaatacgctgctagaagcagttaatcaaatgggattcgaagaaacaacaccaattcaagcaggaacaattcctctagcgcttgaaggcaacgacgttatcggtcaggctcaaactggtactggtaaaacagctgcttttggtatcccaatgattgaaaagattgacacttctctatctcatgtacagggaatcattcttgcgccaacacgtgagcttgctgtacaggttgcagaagaattgaaccgcattggtcaagcaaaaggcgtgcgtgcccttcctatatacggtggacaaagcatcgttcaccaaattaaagcacttaaaaagagacctcagctcgttgtagcgacgccaggccgtcttattgatcatatggaacgtaaaacgattcgtctttcagaagtttcatttgttgttcttgacgaagcagacgaaatgcttaacatgggcttcattgaagatatcgaaaagattcttaaaggtgttccagaaaagcgtcaaacgcttctattctcagcgacaatgccaaaacgtatcgcaatccttgcagagaaattcatgtctaaccctgaaacagttagaacgaaatcaaaagaaatgactgttccatcaattgaacagcattactatgaagttcgtgattctaagaaattcgatattctttgtcgccttcttgatactcagtctcctgagcttgcaattgtgtttgcaagaactaaaaagcgcgtagatgaagtatctgaaggacttaagaagcgtggatacatggctgaaggaattcacggtgaccttccacagggtaaacgtgatcaagttattaaacagtttaaagacagcacaatcgatatcatggtagcgactgacgttgctgcacgtggtcttgacatcagtggtgttacacacgtttataactttgacattcctcaagatcctgaaagctacgttcacagaatcggtcgtactggccgtgcaggtaagtcaggtcttgcttcgacgtttattactccacgtgagtacgatcaccttaaagtgattgaaaaaattacgaagaagtctatgcaaaaacgtacgatcccgagctttgctgaagcaatggaaggccagcagcaaatggcgattcagcagcttcaaagcacaattgaagagcaggatcactcagtataccgttcatcagctgaacaacttcttgatgatcacgattcagtaacgcttctttctgcagctcttaagttgctaacaaaagagccggatacgactccagttaaaattactgaaattgcaccacttcgtgctaaaaaagctcatggccgtggtggcagtggcggtggaaaccgcaaccgtaaccgcagtaatgatcgcggaggccgtaaaggtggaagcggtggcggatatcgcggagatcgtagtaacagcggaggcgctagcaagcgtcgtaagtttaacgacaaaggaaataaataagagataccaaaaagtcgggagaaatcccggctttttttatttgtcatgatcaataagtgtgaaaaacctaatcaaattcatttctggtttcattgatgataagagagaatatttttagacaatactgggaaaatgtcactgaaagcgttattcttagagagacactatttacggaaaggcagcgggatattatgaagcatgattaccagtcacagacgaaagtaaaagaagacgtcctgctagaacgtcttgctctcattcaaacagagttagcgcctgcagaagcatcgaaaatgaaacaattaagcgataaattaatgagtggtgaacagcactttcttttctcgggccatttttctgcgggaaagtcatcattaattaatgcgttatttgaaaccaatttattgccttcaagtcctattcctgcgagtgcgaatacggttcgtattcggtctggaaaatcaggtgcttctgtttattttatcaatggcaaaaaaatgatttttaaagcgccatatgatatcgatcaagtaaaaggttactgcctgaatggagaagaagtagagcgcgtggaattatctgcgccatctatgatcgaaaaagacgttattttcattgatacgcctggaatcgattcaactgacgaggctcataggctttcgacccagtcatccatgtatttagcagatgtcgttttctatgtgatggattataaccatgttcaatcagaagtaaactatcagtttattcgcgagttataccgtcaaaataagaaaatcattttaattgtgaaccaaattgacaaacataacgaagctgagatttcattcaaatcttttaagaaatcagttgtggagtcttttgagacgtggggcatgtcactcgaatcgtttttctttatctccctgcgtgatcaaaaccatcctcaaaaccaatttcatcagctgaaaacctatatcgaaggtctttcgaagaaaatgcccgaggataaagttaagcgagtctacgatgcggcgaccgaacttattgacaacatcgacacggttgatgaggataatgaagtgatccaagcttatgaagagatggaaaccaaactctctttttcaaaggagcgcattaagctgattgaagaggagtttcaatctgaagcttcaaccatccaaaaaagcgcgattctaatgccttatgaagtaagggaggcagggcgagcctacctggaatctttgcaacctggatttaaggttgggttagtttttcgtgacaaaaaaacacagcaggaacgttcaaaccgatacgaggcatttgtatcaggtttagaggaacaagtgaagtcacagcttgaatggcattttaaggagctacttcaggagctaagatcgactgcagccttaacgaaagtggaccctccagttttagatgattcatttcacgtcgatttcaccgtcatacaagaagaagcaaaaaaagggaacggcgcaacgggtgaagcggtgcttcattataccgaaaatgtcgcgcatagcatgaagacccaaatcaagcagcaagcagaaaaacgaaagaatttgctcattgatcaggtgaatttagagcatgaacaaatcgcgatggatgttcaaaaagcttttgaaaatcaagttggagaaaaagattccgaagtcttcttagcaaagatggaaatggtgagtgagaaagctaacggcatctgggcgatccttgaaggaagtcgtgatgaagaagctagacggatagcgaaaagtgtagagcgaaaggaggaaaaacagcaggtcattattgtggagtccgtcgaaaaaaccaacaatgaaattcacagcgaaaatgagggggttttagcagaagaagttgttgaaaagcatgatgatgaccttcctacttctgaaacgactgtacaggcgcttcaaaatatcgcgactgaactaaccgatcttccgggcttcgatcatacaaagcaaaatttaatgaaaaaagcgaataaacttgcggatcaatcttacacagttgcgttgtttggtgcatttagtgctggcaaatcatctttcgcgaatgctttgataggtgagaagatcttaccatcttcgccgaatccaacgacggcaacacttaaccgcatttgtcctgttacaaatgagcatgcacataaaacagcaatgattcattacaagacggaagaggagcttcttctagatttaaatcattctctttcttattttggagaacaggctttttcgcttcgagactgtttgcaaattatatctgccggtaagctgttcaagcgagagtcggctgaaacaaaacctcacgcattatttttacgtgcggttgttaggggagaaggggagctttcgtaccttggaatggaccgagaagtaacgttaacagaatacgaagatatggttgtaaacgaatcaaaagcagcttttatcgcctccatttcattatattatgattgtcccctaacgagagaaggtataacgcttgtggacacgcctggagcggattcgattaatgctcgacatacgggcgtcgcttttcaatatatgaaagccgctgacgcaattctgtatgtgacctattacaatcacgccttctcaaaagcagatcgcgaattcttaattcagcttggtcgggtgaaagatgtgtttgagatggataagatgttctttcttctaaatgcttctgatctggcagaaaacgacggggaacttcacactgtactcgatcatgtgaaaaaacagctgcagcagtatgggattcgctatccatccctctttcccgtttcaagccttgcaggaatgctttcatcagaaacgctaagtgaggaagatgaagcgtttcttacaaagttaccaacacaacttagaaacaaaggtggacttgcttcttttgaagaacgcttctatcgatttattcgaacagatctatcgaaaatggccgtagaagcaatcctaagtgaaataacccgtatcagagaagaaatcgaccattggatcgagcattttgaattgaatgccaatgaaaaagaagatcagctgaagcgcttgcgccttcaaagtgatgaggcgattgaagaagtggagcaatatgccgtgtcaacctccttacaacaaattgaacaggagttaacagaacttgtgcactacatgcctcaacgtcttttttatcgctttaatgacttttttaaggaagcatttaacccttctatcattcatagccgtgatggactaaatgatgcatcgcgttcacttctagaagatattgaacaagatcttcttcaagagttgagagcggcgtcactccggattgatcgatttattaagcgagagcttcaaaagaatgagaaagacatgcagatgaccattcgtaaccacttaacagatttccgctatgcatctaacgattcaaaggacatggcgacacctgcattttcagcttcactcacaacctggatgagcagtgaagcacttgttaagttagcacggagttcttttaaatctccaaagcaattttttgaacaaaatggaagagataacttacacgatgtgctgaaaaaggaatttcaacagcctgttagtgaatatttagctacggaacaacaggtgattacgtcaatggcgacgaatttttatggagaaaaccttgatgaaatgaagcgtgagatcctaaacgaaataagggagtacattgaaacgagaacaacgatgttaaatagtgatttatcaaaagctttcttacaaacgaaacagtcaaatgtagcaagaattcaaacgaacttattgggggaataggcgatgaaaaatcttgtttctgttgaatggctcgcccatcatttatacgatgaacatcttgtgattgttgattgtcagtttgaattaggcaatcctgaaagtggctatgctgcttatgtagaaggtcacatccctggtgctctatatgcagatcttgaaaaggacttatcgggtgaagtcggagagcacggtggcagacacccgttaccagatcaagaacagcttcaggggctcgttgaaaggttagggatccagcaggattctaaagtgattgtatacgaccatgaatatggggcgatggctgcaagattatggtttttacttggttttgccggtcataaggagcgcgctgtacttgatggagggttgaaagcctggagaggggagggacataagctcgagacgaatgtcccggaagttagcctttctgaatatcctattagccttgataaatcaatgattgtttcgatgaacgatgtgaagcaggcgcaacaagaagggcgtaccattattgattctcgtgctccagagcgttttaatggagaaaaagagccgattgatcacaaagcgggacatatcccgggggcaatcaactatttttggaaagataacttgaacgaagatcaaaaatggaaagaccctgaggagagagtaggggtaaacgagcacggtcaggagccaattgtatactgtgggtccggggtaacagcttgtgtgaatttgctcgctctacaggaagcgggagttcatgcgaagctttatccaggtagctatagtgattgggtatcttataaaaacaatccgattgattcaaactaaatgaaagccagcccgaaacacatgtagggctggcttttttctgtgcaattatatggttttaaagagtagaaaggaaacgttctagtcgatccatcccttcttttaacacatcaagtttataggcgaaggaaattcgaacatatccttctccgtatgtggaaaaagcgctacctggaacaacggcaacattgccttcttttgcgagtttcatggcaaaatcaaaagaggttaagccaaattgtttaatagaaggaaggatatagaatgcaccgtcaggcttgattggtgatagccccattccgactaatcgatcatatacatagttcattcttttcgtgtattcctttctcatttcaatgggatcatcaagtccattatctaacgcttcgagagcggcatactgagatacagaagaagcgcaggaaacattgtattggtgcactttcaaaatgtgttttgcgagcgcttctggtgcaaataaaaagccaattcgccatcctgtcatcgcatgggacttagaaagtccattgatgacgattgtcttttctcgcatgctagtaaattgagcgatggaagcatgttcgcctgagaaggttagttctgaataaatttcgtcagagagaacaaaaatgcttttatcttccaatagagcagcaagatcctcaagttcagctgcagacatggcgacgcctgttgggttggatggtgatggaagaatgatgcattttgttcgttctgtcagcgctgattctactaatgagcgtgacagcttaaagccattttccgtcgtatcaatgtgaacaggaacagccccacatagtgtaattattggttcgtatccaggatatactggtccaggtaatataacctcatcgccttcagtaagaagagtacgaagcgttacatcaattgcctggctagcgcctgaggttgtgatgacctcggtttcaggcttgtatgttaggttgtactttgattttagaaaatgggatgccgctttacgaagttcaagtatgccagcattatgtgtatacgtcgtcttattttgatcaatggccgtttgagccgcttccttaatgtgaccgggcgtttcaaaatccggctgaccgatagttaacgaaatcatgttttcataatctgccaccatattaaaaaaagtacggatacctgaaatttcaatggcgtttactcgagggtttaataaatgttccatagggctgtcttcctttccgtctcaacttctcataaacatcattgtagcataattttaaaactatcgtcgaaatgaagttcttttgcggataagttccaaaatagattaaaaatgaaggtgttgataagttggctaagtactggtagtattggttttctgagacttatcaacagaagaaactatatacccacacccggtattttcatttcacttgggggtatagtagggggatataggttacccacaaaattctgtggataaccaatattcagataatttaaagctgatcactaaaatctttcatgatacacaaaaaaccagattccagggtagtggaatctggtttttttttagtttgatgacaaaatactgtctgtcaaataagccagtaaagcgaattgaacgtggatgcgctgttcataagagtaaatatcgattccggttagtttttctaactgtttaatccgataatttagcgtatgcctatgtatgaaaagtttatccgctgttcgattaatgacaaggttattttccaaaaaagcttcaagcgttctcattagttgagattggtgtttgtgatcatatgagacaatcggtgataaaagaggttcataataagtcgtaaggtcttctccgttctcttttaagcgaatgaaaacctggtaagctcctaatgatttatattgaatgagagattcttttcgatacttcgcaaaatggtgagcgactgacgcttcttttagagccgattcaagctcccgaattcctgtagccgtgctcacacctaccgtagataaagacgactcttgctcgtctataaaaggtttaaagtgaccgcataaaagaacgacaacgtgatccaatttccttttgattaagccttttgttcttgtggaaatcaacgtttgctgacactgcagttcgagctcagataggttgggggaggaaagaacagctacgcagttaagaccggttaaatcatagcccatttctttgcttttctttagaatcgttttctcatcttcatacgaatgcgaaaagagaatatcaagaaagtccgcttccatttgtgatcgtgtatcttcaataattcgtagcttgagaaattcaatcgcaaagatattcgctgcttgtttaagcgcaagctgatcaagtgacgtgagcggagtctgtttttgaatgaagatcgtgccgatggtttgaccttctgtcacgatcggataagcgtgttcaattggatattgtcggtttgttatatatgaccctgctaaaagagcttgatttgattcatagagggatacattgcagtaaagtaattttgaaagcgcgtctgttaatgatgaaaaaccggtatttttaatgactagagctgttaattcatcttgaatgcgctgtgcttgtgtgagcatactaagctgtttattaacaagctgttctagaatgcttctagtaaccgtagaaaaattcatcgttcttggaatttcaaggagcggtaaccccgttcggtttgcggcttcaatcatcgctaaaggaacaacatccaggtaaaatcccgtgtgaatcgcaaccgcggaaagctgccgatttgaaagtgcgtggatgagcattgagtaagagtcggatttttcatgccaaccgtatgccgtagtaattaagaattcaccttcatgaagacgtgtaacgtcctccataacttccacaatcgttaaccacttaatatctcgatcgattccttgttttccagcaattaatttgatttccctcatttcggatagttgtaatgcctctctaacggatagtcccatcgatgtgtcccccaatcctcttatccaaatcgtacaacaaagtctaaattttttgtagatggtgtggaatagaattttctcgctttcccacatagtctagagatatagacaaaaaaagtgaggtgaccaatccgaaatgacgaaaagaacccacttgatcaaacctttgcttgggatggattatgctgttatttctcacggaaaaggaatttatttatacgatgaagaaggtcatgcctttattgatggatgctcaggggctgtcactgcgaacattgggcatgccgttccagaaattaaagaagcgatggtggcgcaggcagatcaggtatcatttgtgtatcgatcgcagtttacaagcacttcagctgagcaactcgcagaacgtctttgtcagtctgcaccgggtgaccttgactgggtgttttttgtgaacagtggatctgaagcgatggaaacggctttaaaaatagctgtgcagtactggcaggaattgggtcgtccaacgaagaacagaatcatatcacggtggatgagctaccatggaattacaatgggagcgctatcgatgtcaggtcatgtgattcgtagaagtcggtttaatgcgatgcttgaacactatccagcgctatcgcctccttattgttaccgatgctctttccatgatcattgcccaaattgctcgaaacaatatgcattggaatttgaacaaaccattcaacggctaggtgccgaaacgatcgcagcctttgtttgtgagcctgtgattggtgcagctggaggagctgtggtaccacctgatcgttattttcatgaaatgaaagccgtttgtgagcgctatgacattctctttatcgcggatgaagttatgacaggtataggtcgaacagggaagatgtatgcaatggaacactggggagttgccccagatattttagcgctcggtaaaggaatgagtgccggttacacaccgatggccgcaacgctagtatcggatcgaattattcaagtcattgaacgaggatcaaaggtcgtcttaagtgggcatacgtttagtgcaaacccattatcatccgctatttgtcttgctgttctcgactatatcgataaaaacgatgttgttcaaaatgcttccaaaagtggggcttttcttataacaggattaaaagagttacaagcacaatatcccattatcggagatgtgagagggcttggcttactaacggccattgaatttgttcaagatcaagtgacaaaagagccgttttcgcttcaacatgaaataacgaatcgttttattcggaaatgttatgaagctggtcttctagtatatacagctgcgggtggcttaaacgggacagctggtgacgctgtcattgtggcgcctccgcttgtgattaaagaacatgaagttcaccttctcctatccaagctgaacgtaggattaattgaattggagaaggaacttgaagcagaaggactctaccaaaagcgctcgataagctgatgatcggaggaaactcaatatgcgaagtaagacatgcgatttgtctgaactagatattttgaaagataacatgaccatcatgtgcggtggttttgggggagtcggttcaccgccatcgcttattgaatggatactagattccggcattaaaaacatcaccctgatttgtaacgatgctggattcccttggataggaccgggcaagcttgtaacagaaaaaagggtttcaacactcattgcctcgcatattggatctaatcctgaagcggggaagcaaatgcatcgaggagaactcaatgttcaattttatccccagggtacgcttgcagagaaaattcgcgcaggtggaatgggacttggtgggatattagtcgatgtagggcttggaacatccgttgaagagggaaaagaaaagacatttgtccaggggaaggaatatatgattgaacctgctttaacggcagatctatcgattgttgcctgtaagcaagctgatttatacgggaacttgctttatgatcaaagcgcacggaatacgaatccgcttgtggcacaggctggtgatctaacgatagcggaagcgtctgaaatcgtccaaataggtgagcttgatcctgaacaaattgtgacgcaaggtgttttcgttgattatgtgatcaaaagcaaaggggttgattggaaatgggtatgggagctgaaacgagaaggttaatcgctcaaagagctgcacgcgaagtaacatatggcatgatggttaaccttgggatcggtattcctactttagttgccgactatattccagcttccatggacgttatgcttcatacggagaacggcattcttggcatgggaggtagcccggagcctggtcatgaggacggcaacctttcaaacgccgggggttatcctgtcacgattcaacccggtgcttctttttttgatagtgcagaagcatttgggatggtaagaaggggatatctcgatttaacgattctcggtgctcttgaggtaagtggcaaaggagacattgccaattggattgttccgggaaaaagggttccgggtatggggggagcgattgatcttgcccaaaaagctaagaaagtaattgttttaatgagccatacaacaaaggaaggcaatcctaaaatcgtacaagaatgctccttacctttaacggttaaagagggtgccgatatgattatgactgagcgagcagtgatgaaggtggaggagggtaaactttatctgttagaagtgatgccaggctactccttgaccgatgtgttaaacgctacagaagcgcacgtaaatgttgatcatgtaaggggggaaacgtattgaagagtaaaatcaaaagttggatggacgatcatcaaaatagcggcataaacctgcttcaacgatttgtgcagtgtgatagtgtacaggggaatgaagcagaagtgcagcgccttgtggaagctgaactcgaacaattagaaatgaaagtcgatcgcttctttccaggacctgagacgatcaatcatcctgccttttgtgcaaaccgtactgatttttcgcaaagtcctaatatcatcggcgtttggagcggcagtggtggtggtcgatccctcctattaaatggccacattgacgtagtaccaccggggaataggagcgattgggaagaggatccctatagtggcttagtgaaggatggtcggatatttggaagaggcgccacggatatgaaaggcggaaatacatctatgcttcttgccttaaaatgcataaaagaattaggaattgtattaaaaggcgatgttatttttgaaagcgttgttgaagaagaaagtggtggaacaggtacgcttgcggcgattgagcgcggatatcaagcggatgcggcgcttattcctgagcctactaaaatgaaaatttttccgaagcaacaggggtcaatgtggtttcgcttaaacgtaagcggtcgaggcgcgcacgggggaactcggtatgaaggggtttcagcgattgagaaaacgatgttagtccttacagcaatacagaagctcgagcaaaaacgaaatgacgcgattacggaccccctttatcaaaatataccaatccctgttccgattaatatcggaaaaatttctggtggggactggccatcttcagtgcctgatcaggtagttgtcgaagggagaatgggggttattcctggtgaagagctagatcatgcaaaagaagaaatgacgcgtgcgttaagggaagtggacgacgcctggttatcggaaaacccagtagggatcgaatggtttggagcgagatggcttcctggtgaagtagatgaagatcatcctctcgttacgattattcgtcgtagatacaaggagataacaggagaagaagtggttgttgaagcatctccttgggggacggatggaggcttattacaagaagtaggacagacgccttccattgtgtttggtcctggcgagacggctgttgctcattttcctaatgaatacattgagattgagaagatgatgctagcggcagaactttatgttcatattataatggaatggtgcgggtttaacgattaagagcggcggcgctctttttttcttttttggaggagttccttctgagaaagaagaaatactgtttaggaagcggggagggattgcgagtgaatcaaaaacaattagaagcagtggaacaagtgtatcgtgatgtggactatacgtttacttgtacgcttgatcgctttaatgagcgaattcgtgtggatcattatgatggtaatcttcgttccattgccgctcacattcagagtatcttcacgaatgagtatacaaaatgtatcgtgaaaggaaagagtgaacacgttccgttctttctttccgaatgctacacgtatgaaggcgtcattcaatcctattattcaggcagtgatgctcatttaatgacgttatataacggagcctggcgtcgtaatagccaaacgtggttggaagaggatcagctactagcttctgttcgtcggaagctagtctctccacttaaggaaaagccactcatgcgaaaagggacggaagcagaggcagagaaacttgctgctctctatcaaaaggtgtttgccgtttacccaaccccaatggataatccaaactatattaagaaagtgatgagaagtgatacaattttctttctgattgaagagaatgaccggattgtgagtgctgcttcagcagaagtgaaccgcacctataaaaacgcggaaatgacggattgtgccactctcccaaaatacagaaagggaggtacgatgcgtcacttaattatggcgttagaacaagaactgcttcgagaaaatatttattacgcatactcgatcgcgagaagccgatcgtatggaatgaacgctgttttacatcaacttgattataaatacggaggaaggcttgtcaataatgtgaaaatttttcaagattgggagaatatgaatctttggagtaagcttcttattaaaagtgctgaataatgggcactaatagatggatttctggcataaaggaggacgtctatgaggaatacgttaactgaaggcatgtttgaagccattttagaaagtattgatgagggcattcacgttgtagataatcaaggcgtcacgatttactacaatgaaattgccgcaaaacacgatggattactagtagaagatgtgttaggaaagcattatttagaagcgtttccttctctttcaaaagaaacgagtacgctctcacacgttctgatgacgagaaaagcgatttttaataaagatcaaacgtatcgaaatatgaaagggaaacttatctcaacaataaatacaacgttgcctattgtcgttaaaggccatctagaaggtgctgtagagattgctcgtgacatttctcgtattaaaacgctatcggccaaggtaatggagttacaatcaaaaatgaacaagaaaacagcaaaagaatttgatgatgggaccagctatacgttcgatcatattcgaacaaatgatccagtgtttatgcaagtgaaggagcgggcaatgaaagcttcagctctaaactctcctattcttgtttatggtgaaacaggtactggaaaagagctaattgtgcagtcaattcacaatgcttctaaacgaccaggaccatttatcgctcaaaactgtgccgccttacccgcatcgattctcgagtcaattctctttggaacggcaaaaggaagctttactggtgcggaggaaagagaaggtttatttgagcttgcgaatggtggaacgctttttcttgatgaaattaattcgatgccaattgatgttcaagcaaagctacttcgcgtattagaagatggggtgatccgacgagtaggcgcaggcaaaacaagaaaagtggatgtacgtatcattgcagcgatcaatgaagaaccggaattagcgcttgaagacaggcgcttacgtgttgatttgttttatcgtctaaatgttatttaccttcgaatacctccgcttcgtgagcgccgtggagacattcctgatttaattgctcattttatcgaaaagtataatacgaagttccagaagcacattgtttccattgatgagaaagcagagttccgattgtatcatcgaagttggcagggaaacgtacgagagctagagcatgtaattcaatcagcgatgaattttgcagaaggcgacgtattagttgaaaaggattttccgatgttactttcagaaccgatgcgagaaatggggcagtcgcttccagaaatcttacttaagactgaggcagatcttatccagcgggcgatgaaaaattgtcttggcaatgtgaaaaaagcagcagagcagcttggcattcctagacaaacgctccaatataaactttccaaacatcaaagtcagagtgccgaataatgagcacctctgactttttttattgcatgttatactcctcatgcgtggtactctgctctcttgaaagaaataatggagctggcacactacttgcatagtatagaagtagattacatgaagggggaatgtatgatgctaatgcaactttataagcctggtcgtcattggaaagacattgaactgtggaaggatgtaaccgatgatcaatggaatgattggatctggcagcttacgaatacgattcgaacgctagatgatttaaagaaagtcgttaatttaacaccggacgaagaagaaggtgtcaagattgcgacaaaaaccatcccattaaacataacaccttactatgcttcattaatgaatcctgatgatcctcgttgtccggtacgcatgcagtcagtgccaatttctcaagagatgtataaaacgaggtatgaccttgaagaccctcttcatgaagatgaagactcgcctgttccaggattaacgcatcgttacccggatcgcgttctttttctagtaacaaatcagtgttctatgtactgtcgttattgtacgagaaggcgcttttctgggcaaattggaatgggcgttccaaaaaaacagctggatgaagcgatccagtacatttcgaatacgcctgaagtgagggatgttctcatttctggcggagatgggttattgattaatgataaaattcttgagtacgttttgaaaaatttacgagcaattccacacgttgaaattattcgaatcggaacgagagcgcctgtcgtctttccacagcggataacggaagatttatgtaatattcttaaaaagtatcatcctgtttggttaaatacccactttaatacaagtattgaaattaccgaggaatccaaaaaagcatgtgaaatgttggcagatgcgggtgttccagtcggaaatcaagcagttattcttgcgggtattaatgatagcgtcccaatcatgaagaagctgatgcacgatctcgtgaaaataagagtaaggccttactatatttatcaatgtgacttatcagaaggaatcggccatttccgtgctccagtttccaagggattggaaattattgaaggattgcgaggacatacgtcaggttatgccgtgcctacctttgtcgtagatgcacctggtggtggtgggaagatcgctctacagccgaattacatgatttcccaaagtgcagataaagttattttacgaaactttgagggagttattacctcttatccagagcctgaaaattatacgccaggcacagccgatacgtattttaatcaggtttatgaaatgaagaaaaaaccggctattgggatccattccttgatgacggatgaacgatttaatcttgttccagaggggatacagcggtttgatcgaaggtcgaagtatgaacaagatgcggcgcacagctcattaaaagataaacgtgataagcgagacttaatgaaggaaaagaagtttaatgcagagcagcagaaatacaaaggcagtgaggaaggagaagaaagcgtatgatctgtaaatggtgcgagcaacagggcgcatttgaaacgcttgataaagggtattgggagctcccagacggatctagagctgtagaaataagtgatttgccgtcaattcaatgtagtgactgcggaatgtgttaccaaacggacgaattagttggtgatgtggaggaacagcttatgctaattgatacgtcgaaattacctccttctttttcctacaaagaattaatgagtcaggagcgacttttaaagaaaaactattttgacattaatcgctatccgctttaaaaaggactttcaaagactaaaatatgaaataaaaaaagttatatcggaatattctgaaaaatattgatattttgacgattccctcgtataatagaaaaaagagcttcagaggggggagagctagcatgaacaatcatcataagtcgtataaagacaatatgaaacaacgtgctatgaaaaagaaacaagaacaggaaacgtttgagttggaattgtacgcccaattaatccttgatgaagccgtctttactttccaggaagaacgttatcaacaaaccattgatcaagctctagaccgacgagacgagaaggcatttgaagaagcgtcaagacagtatgttgcgtttctccgttcttacaaacaggagcttcatttcgactgaatagaatgagacctaactgacacaaactagagaagaagtactttctaaaggagtgtcacgatgggcagacagaaaaaaggaaatccaaatgcacagcgtaataataacgcaaaacagcaaaaagcgaaacaaatgccttcctatgcagagatggaagcagaaaagctaaaaaatccgcagtaatgaaagaagccttcaattcattttggaggcttctttttttgcgctcaaaacgcactttcgaaatctatgttaccattacaaaagaaaataggttttttgagcgaaaggaagatcagaaacatgggaagactaatcttaattgatgggtttaatttattaagtaggggttattttgcaaccgcatatggaaagtcagaagagcagctttcaaaaacttctgaaggacttttcacaaatgctttaagagttaagctacaaaaaataatgtctcttatcaatgattatgaaccaacgcattttgttgttacatgggacgtaaaacgaaatgaagtaaagcgtaaagcgctatatgaagactataaaggtacaagagatgatctgccagctcctcttattcagcaatatgaaacagccgtgaatttgtttaatgcaacaggaattccccagatgagtgtagaaggatttgaagcggacgatgttatcggcacactttcagataggtggacaaaagaagggcatggtgattgttacatctacagtaacgataaggacttacttcagcttttaaatcctgccgtctcacaaatcatcgcggttcgaaaagaaggcgaccgggtatatacagaagagcattttaaaacagagtatggcattactcctaatcagtggattgatgtgaaagctctcttaggtgataagagtgataatatcccaggtgttgctggtgtaggagacaaagcagctttaccacttattcagcactatggatcggttcaaggtttgtatgaaagtattggtgtactagacagtaaatataatcgttatcgaaaaaaactgactgagggtgaggaactggcgaaattaagtttagagctcgttacaatagagcgcgccattcctgaacttgatctttattcttttgcggagtgcaagttagatcttgatgttaaccaaatgaaatccgagctcgataagctagggttacgcatccgtatgtaaagaataagaacattaaaacagcgcctttgcatgaaaaggcgctcgttttgttcggttgaaagactattgttctttctgttcattttgttgaattgcttttcgagcgagttcgtctgccattttatttttcgaactaggaatccacttaataaaacagaggtcaaactgatccactaattcaaggcatcgagttaaatatggcagatacactttattttttacgtaccttccatctacggcgctgctgacgagctgtgagtctgttcgaatggatagtgtacggtactggttctctttgcagattgagagcgcgtgaattaatgcttcaaattctgcttcatggtttgagagcgtgccaagcggaagagcggatcgaatgacgctcccttcagctttaataaaaacaccggcaccggaaggacctggattgcctgcgcttgctccgtctacatatacttcaatcatatggtgctcctctctgtggactggtcttggtgtattttatcataatcatgttcgtagagagaagacatacatttaagataaaaggagaaagctgtatagaagggactgtgtgtaggagtgaaaagtatgaagaaaaaagaagtgatgatggaagttggattaatccttgatacatattgtcaggattgcttattaaaaagagtcaaccagcatgattacggtaagtgtcacgcccagcgattttgcattaccgaatgcacggttggagatgaattaaaacaattaggcaaacatttgacataaggaggaccaacgatggatgtaattgtaaaatggaaatacaaaacgcctagaggcatttcctcctggatgacgtctgatgaaatgccgtttaatgaagcgatgctaatggcgcgggatattgctaaaacgggtcgctccattgatttatactttttagataacagaggtacaaaatggtctgtgaaagaattggaaacatatatgaccaaaaaacaagaacgccctgcttccatcgaaattatttttgatggtagctttgataaacagacaaagaaggctggttgtggcgcagtcatttattattatgagggaagaaaacgaaagcggattcgtatcaataaagcgctggactatcttgagaacaataatgaagccgaatatgcagctttatggctaggtcttcaggaaattaaaacgattgatgtagaagatacggaaattctgattaaaggggattctcaagttgtcatcaaccaacttgcaggcgagtgggctgtatatgaaccgctcttcacgagatggatggatcgaattgaagatacgctccaacaacttagactgcaaccggtgtacaagcatatttctcgggatgaaaataaagaagctcatcgcttagcgaagcaagcgttgaatggaacagaaattagtagttcaattgagctggataacgaataagagaagcagcaattaggctgcttctcttattcgttcgcttctcttaattgggtttcgcatttttcaattaattcacttgagaattcataaaattgttcattagtaccggacttatgtgaaagtgcctgttgaaactgctctttggcctggttaatggcgtcttgagcagctttcaattgattcccattcatactttttgtggcctggccaaccagatgctgtgctgatttaatggacatttcaatttgttgtaaatcagaatatggttctgacatgtaatcccacctttatcaatcattcaagcatagtatggccacaactaaagggaattaaccgaaaaagacgcaaaaaaaggaactgatgcaggcatcagttccttttgggtttataattaaagtttgtttacgttagcagcttgaggtccgcggtttccttcaacgatttcgaaagaaacttcttggccttcttctagtgttttgaaaccttcgtcattgattgctgagaagtgtacgaatacatcgtcagctccttcgatttcgatgaaaccgaatcctttttctgcattaaaccattttactttaccgttttgcatgtttgttcctcctaaaagcttagcacaatccttgtgcactttaaatttcaaccattcatcggatgttgaataagagatattcgacgtgtacgagaagtgcacaaaaaatcgaattcaaattctcaatcaaatatcctatgtgataaatggttaatttaactataacgtctcactataaaaatgtcaacactacctagagaatagcacataatccttaacgtagagaataaagttgggtaagatggaaaatggagttatgcaatttaatttatggaggggttttatgaagccgggactaacatataaaagtgatatcgaaattgcacaagaatctaagatgacgcgaattaaaacgatcgctgcacaattagggttacatgaagatgaatgggagccatatggtcattataaagcgaaaatttcattaaatgcgatgaaacgtttgaatactcacccttctggtaaagtagtgcttgttactgcaatcaatccgacacctgcaggagaaggaaaaagtacggtaacagtcggtcttgctcaagcattaaatcgaatcggtgaaaaagccattgtcgcgatgagagaaccttcacttgggccaagcatgggtattaaaggtggtgccgctgggggaggatatgctcaagtcatgcccatggaagacattaatcttcattttacaggagatctacatgcgataacgtctgctcataatgctctttcagcccttatcgataaccatattcatcaagggaatgaagtcggttttgatactagacgcgtgacgtggaagcgagttgtggatcttaacgaccgggcgttacgaaacgtaattgttggtttaggcggtccaacgcaaggagtgccccgtgaagacggatttgatatcacagtggcgtcagagattatggcgattctttgtctagcatcagatttatcagatttgaagaagcggattgcttcaattgtgatcggatatcgctcaacgaaagagccgattacagctggcgacttaggtgtagaaggggcgattacacttctattaaaagatgccatgaacccgaatctcgttcagacgttagaaaatacaccagcgctcattcatggggggccattcgcaaatattgctcatgggtgcaatagcgtcgttgcaacgaaaatggctcaaaagctttctgattatgtgatcactgaagctggttttggggctgatttaggcgctgagaagttctttgatattaaaacgagagcaggggaaattgaaccagcagcaaccgttattgttgccacaattcgtgctctcaaaatgcacggcggcgtagcgaaggatcagctaaaaaaagaagatgttggtgcgttacaagcagggcttgttaatcttgagcatcatgtggcttctgttaaaaaatttggcgtaccatttgtagtggcgattaaccgttttgtgactgataccgaacttgaagtaaatgcattgcttcaatggtgcaaggaaaaggatataccagtggctttaacagacgtatgggcgaatggtggagaaggtggcgtggaacttgctaaaacgttattaaacgaaatggaacaaaacgagaaccatttcaaacctctctatgaacttgaaagtaccattcaagaaaagttggaaacaatcgcaacagaaatttatggagctgaaggcgttgatttgtccgctaaagcaaagaagcaaatgcatgaatttgagggaaatgggtgggggcatctgccgatttgtatggcgaaaacgcagtattcactttcggacgatcctttactactcggacggccatctggctttcgaataacgatccgtgaatttcgcccttccattggagccggatttatcgtagcattaaccggtaacgtaatgaccatgccaggattacctaaaaaaccagcagctcttaatatggatgtttcagaagatggaaccgcaattgggcttttctagaaagtgtggctaaaaaatgtcgaatactgctttatcaaagaaattaatacgtgattctagaacgacaaaatcgagctttgtattaccctctgacacgaatacacacggaacactatttggtggtaaactaatgtcttacatagatgacatcgcggcgattgcagcgtcaaagcacgctagatccgctgttgtcactgcatcagcggactccatagattttctaagtccgattcgtgaaggagaagtcgttagcttagaagcctatgtaagctggacgcataatacatcaatggaagtgtttgtgaaaatctttgcggaaaatgtgatttcgagtaaaaagaaggtatgtgctacatcttttttaacgtttgtggcgctagatgaagaaagcgttccggcaagggtaccagaagcaatgcctgaaacggaagaagagaagttcgtgaacgatggtggttacgaacgtatgaaagcgagaaaggctagaaggaaacattcacagacgctagcaagtgaatttggcgttttttcttaagcttctccacaaaaaaagatctgctaacagcagatctcacgtttcaaatccaaggatgaaattattctgtcgatcctgaatttgctgttgcgctctatgaagcgcgtcacgctgttcaggatttgcactgtgaatcattttatcaagttcaacagacattcgttcaagcaattgttgcgtttctgtataacccttatcgttgaccgctgattgctgctttgtagctagttggagctgctcgtcagcatattcagttagctcatgagcgttttttaacatttcttctactttacggtatgtggacatgaggaacctctccttttgtattgattcatgattagtattgacaggaaagatacttttatgagaacgaatgggaaataacagaagtgaaagtgatatactaagatgagaaacaagaaaggcgtgaatcaagttggcaagtgaattacatgcaggagaaatgactacgttacgtgtcgcacgtatgcaagaatacggctattttttaacaaatggatatgaagatgtgatgcttcataaaaaagaagctaaaaatcattacgaagaagatgatgaagtagaggtatttttataccacgatcatcaaggaaggctttcagcaactgagactgttccactcgtaacgatggattccttttcgattctaaaagttgtagaagtaaagcgaagccttggtgtatttgtggatattggtattcaaaaggacatgcttttatcaaaagatgaccttccttatgactgggcaacctggccggctattggtgatgagctctattgtggactaaagcttgataaaaaacagcgtctttttgctgatttaagtaaatttgaagaaatccaggaactttcggttgcagcaccagccgatagcaaaaatgctgaagtagaaggacttgttttccgcttccttgatgatggcgtttcaattctgaccagtgaagggtatcttgcttatttgcataaagatgagatgaaagaacaagtaagacttggtcagcgtcttacaatgagaattacatttgtaagagaagacggtcgtgtgaatgtatcgacaagacctcttgtaaaagaagcaagacttgaggattcagatcgccttgttgcatatatggagaagcacggcaatcaaatgccttttactgacaaaagtgatccagaagcgattaagaatgaatttaacataagtaaagctgcttttaagcgcgcaatggggaaattgatcaaggaaaagaaagttgaacaacaagagggagtcaccattttaaaatcctaatatgtcatctttttcttcgtgtaactggagcttacgggctaatactatacctaagctcctagaaagggggcaagtcattggacattactgactatgacaaagctctatattacacgcatcattgtgcttgcattgatcttagcgttttgatgatgaaaacagaagatgacatcctttcgaagcgaattgaacaatttgttcatgcctttatacgtgaaactgaatttatgaaggtaaaggaagcacgtgatacgcttctatcctacattgattacgtatatcggatggaacccgaccttagtgaaattgccgctataaatcagactttagactgacctcaaacatacggggtcggtttttttattgttaaaaaggtttaaaattgtcgaaaagggtataattgtagtaaaaaataaggagcaggtgagtaatatgaatcaacagcagctgcacagtgtacttgaaagtatgcgactacccaatggagcttatgttgcaagtacatccgatgattacgactacgtttggatcagagatgtatgctatgcggttatgccatatttaaattctaaatgttcacgatatgaaaaagcgtatcatgctttactcacattacttagaaaatatgagtggaagcttgatattcataccgaacaaaaaccacattatttacatgaatacattcatgcacgttatacgagaaatttagaagaaattcccgttgaatggggacatgcgcaaaatgatgcgattggtattatgttattcggaatcggtcagggaattcaaaatggtaagccgatgttaagagacaaagtagaccatcgcatcgttcaaaaacttgtagactatctggaatgtctcgaatactggaaaagccctgataatggcatgtgggaagaaaatgtagaactacatgcgtcaagcgttggagcgtgtgtagcgggactaaaagccgttaaaactctcgttaacgtaccgtcttacatgattgaagaaggtgaaaaagctttagataaactgttgccttgtgaaagtgaaacgaaggaaacggatttagctcttttatcattaatttatcctttaaatgttgtttcaagagaacaagctatacaaattgtggaccgagttacagatcgacttgagcgtgaacgaggcattatccgatatgaaaatgatgtgtattataatgaaggtagcgaagcggaatggtgtttcgggttcccgtggttaggcctttgctatgagcagctaggagaacttgataaaatgagtgaatactggtcgaaaacgatgagtataacacctgaaagtggaaaaatccctgaactctatattggcggtacgaatattccaaataaaaatacaccgctagcttggtcaatttccatggcttatcaacttcaagtacggatgaatgaaatgcaagagaatgtttcttaaggtttatttataaatgtggaaggttgcgtgttgtagcgcaacctttttttattgcaatttatgaaaaaatattcccttatttgtcgaaaaatacatgtatttttcgacaataaattttttaaaaggaaacctaaaggtacgtgtcgaatctttaggatgtagaggataagtatcgtggaatccctctatttatcaatgagagcgaggtgtcgcaatgactgtatctatgccgacagagtatgatcggtatctatttcatcagggaaatttatttcaggcttatcgttcaatgggcgcccatttaagggaagaagatggacggtttggagtcaggtttacagtctgggctcctcatgctgcagcagtagccgtaacagggaattttaatcaatgggatcccacatcgcatcgtatggaaaaagtggaagagtcaggactatggtcgttatttgtagaacacttatcagaaaatgagctctacaaatatgctgtcgaaacaactgcaggggagacgctcatgaagtctgatccttatgctttctactcagaacttaaaccgaagacggcttccatcgtaaaaaaagttgataactttgactggcatgatacgaagtggatggcgaaacgaaagaaaactgccccatatgatggaccgctatcaatttatgaagttcatcctggttcatggcgtaggaaagaagatggttcttattattcctataaggatcttatgcatgaattgattccttatgtgaaggaacatgggtacacacacattgaactaatgccggtaatggagcatccatttgatcgctcgtggggctatcaaattacagggtacttttctgtcacaagccggtttggtgagcctgatgatttaaaagcgtttatcgataaatgtcatcaggaagatattggtgtgattcttgattgggtgcctgctcatttttgtaaagatgcccacggcctcggtcagtttgacggcggaccggtatttgaaccgtctgatccagctcgagcggaacgacacaattggggaacgtacaatttcgattatagtaaacctgaagtggtcagttttcttatctcgaatgctgtcttctggtttgactattaccatattgatgggttaagagttgatgcagtttcacagatgctactttatcaccatgaccatgaaagcggtggcgtggaaggggagaattctgcagcaaaggaatttattcagaaattaaatcgaacaatctttgaacaattcccaaatgttttaatgatggcagaagagtcgactgattatccgctagtaagcgcacctattcatgaaggtggcctcggtttcaattataaatggaacatgggatggatgaatgatgttctgaagtacatggagcttcacatggatgatcgcaaacaccatcataacttgttaacgttctcttttttctacgctttttcagaaaactatctattgccgctttcacatgatgaagtggtacatgggaaaaaatcattgctaaataagatgccaggtgactattggcaaaaatttgccaatcttcgaacgctttatgggtacatgatggctcatccggggaaaaaactcctttttatgggaggagaatttggtcaattcgttgaatggaaagatttatctgagcttgattggttgctttttgactatgacatgcataggaagatgaacgcttatgtaaaagatctcaatcatttttatcttgattcaagggcaatgtggcgcattgatcatgagtctgaaggatttgaatggatcgatgcgaacgataacgcacagtctgtcctcacctttatgagaaaaggcaaagcaaaaggagattgcgatatcgcgattattaatttttctcctaatgtgtactatgattatcggattggcgttccatctactggaacgtatattgaaatgtttaatagcgatcaagaaaagtacggtgggtcaggtcagctaaacgcagacgaattgcaaagcgaaaaaacgccatatcacaatcaaccttatagtctgatgcttaaagtaccaccgcttggaattgttgttctcggcaaaaaaaataaaagcaaccttgaaaggagaaatcgctatgtctaaaaaacgttgtgtcgccatgctactcgcaggaggtcaggggacaagattaggaaaattaaccactcgtcttgcgaagcctgccgttccgttcggaggtaaatatcgcattatagatttcacccttagtaattgtagcaattccggtattgatacggttggtgttctcacacaatatcagccgtacatactcaattcgtatatcggaattggcagttcatgggatctggaccgaaaaaatggaggcgtttccgtacttcccccttatatgggccaaaagggcggcgagtggtaccgcggcacagcgaatgcgatttaccagaacatgtactatatcaagcaatatgacccagaatatgttcttgttatttcaggagaccacatttataaaatggattattctgagatgcttgattatcatgagcagcgtgatgcagatgcaacgatcggggttcttgaagtaccatggaatgaagcaagtcgcttcggtattatgaatacggatgacgaagatcggattgttgagtttcaagagaaaccagctgaaccgaaaacaaatttagcatcgatgggcatttatattttcaattggaaaacgcttgaaaaatatttgacagaagatgaggaaaatcctggatcatccaatgactttggtaaagatattattccagccatgattgaagacgaaaagaacgtatttgcctactcattcaatggatactggaaggatgttggaacattacaaagcttgtgggaagcaaacatggatcttctcgatgatgatccagccttgattcttaatgatccagcctggaaaatctattcggtgaatccaaatcaaccaccacaatatatcgctcctcaagcgaaagtgacacgttcactagtaaatgaagggtgcgttgtgtatggcgacgtttatcgatcggttcttttctatggcgtgcacgttggacttggaagtacgattcgaaactcaatcattatgccaaatgtaaaaattggagcaaacgtaacgatcgaaaacgcgattgtagaaagtggcactgtagtagaagatggtatgacgttagggtcaagtgatggttccatttctttaattgctgatggcgaaatcgtctcggtaccaaaatagagtagggggattaaacgatgaaaaaagtagtaggagttattaacctcgtagatgaaaaaaacacactaagtgagttaaccaatcatcggagctttgcctctgttccatttgcagggcggtatcgactgatcgatttctctttatcaaacttaacaaatgcaggtgttaacacggtagcggttttcactcgtgaaaaataccgttcattatttgaccatttaggttctggccgagagtgggatcttgatcgccaacagggaggtctcttcttccagcctcctgcagatgaagaacgcagaaattctggcgacatccattcattttatgaaaacctttccttctttaagagaagcctttctcattatgttcttgtcacaaacggacagcttgtctggaacgtagatttcgatcaaattattgacgaacatgaggccgagaatgctgatataacggttgtatacaaaccttgtgacgacccttatacgagtggcagtcattataacgtgttatatacgaacgatgatgaacgggtagatcggttaaatttaggtgttgaaccgttaccaggagataacgtgtttttgaacacgttcttggtgaaatcatctctccttatttctcttgttgaagatagcattgagagtgggaagcatgagtcaattaatgaagcgattgctgcaaatttagatcgttaccatgtacacgcccatcattttggtggatatgttaccttcatcgatagtgttgagagctactatcgttatagtatggaaatgcttgatccaaatgtgacgcaggaattattttataacacgggtccaatttatacgaaagtaaagcacgaatcacctgcgaagtatttagaaagctccagcgtgtcgaactccttgattgcaaacggctgtacgatttcggggacggtagaaaatagcattttgtttagaggaattagagttggaaaaggtgcggttattaaaaacagtatcattatgcagaagtgtgaaattggtgagggtgcagtgattgagaatgtgattctagataaagacgtttccgtatcaccaaacgagaaggtaatttctgaagatcaaccacgcgttatcgcaaaatcgactgtcatctagtagggggaacttgtaatgaacgtactatttgctgcatctgaaggtcatccatttattaaaacgggtggtcttggtgatgtgatcggtgctcttccaaaagcacttcaaaaacagggagcgaacgtttctgttatcttacctaaatatcaagatatgaatgaggagtttaaaagtcagcttgaattaaaagagacgattaccgtttcagttggctggcgcgataaatattgtggcattgaaatgcttaagtatgatggcatcacctattatttcgttgacaatgaatattattttaagcgaagtggtagctatggatactttgatgacggtgagcgcttttcatttttttgtaaagccgtattagaagcgattccatatcttgaagatcagcctgacattctccattgccacgattggcaaacagggatgattcctgtgctaaagaaagcccattatagaaaccacccgtactatgagggaatgaaggtcgtttatacaattcataatttgcgttatcagggcatttttccaaagtccattttgcatgatttgctagatttaagcgaacttcattttaataatgaaggcgtagagtttcatggaaatgtaagcttcatgaagggtggactgctttatgcagattacattacaactgtaagtccatcgtatgcggatgaaattaagcagccttatttcggtgaatacttggatggagttatgaggaagagagaaaatgaatttactggtattattaacgggattgatacggatctttacgatcccgccagtgattcggctcttgcttatacgtatcacgcctcacatcttctaaaagaaaaaaacaaaaccgatcttcaaaagaagctcggtctacaaataggagaaggcattccagttattgcccttatcacgcgacttgtcgaacaaaaggggatcgatctgttcttcagagtcttacctgaaataatggagcaaaaagtccaggtagttgtacttggaacaggtgatgagcattatgagcatatgcttcgagaagcagaagcacgctatcctggtagattttcagcaaacatttattttgatgatggttttgcgcgccagctttatgctgcatctgatttgttcttaatgccttcccaatttgagccatgtggcattagtcagctgatcgcgctacgatatggcagtcttccaattgtacgagaaactggtggcttaaaagatactgttcaaccttataacaagtttacaggggaggggcatggatttagttttgcgaactataatgcgcacgagatgttagatacgatccgacttgctcttgatctctatcaccatgatgacatcacgtggaaaaaactagttgtaagagccatgcgtcttaactattcgtgggaagcttcatcagtaaaatacttaaatttgtatcaaaacctattaaaataatttcaaactttaccgataagaaaagcagaggggaaactctctgcttttttcgttaagaatgctacaaatttaggataggagaaattgattgatgatatcatgtacaaagtgccaaactataccagacattcattcttctggttatatagaaatctttactaccgtccctcagctgaatcaaagtttacatgacctcatgggccgaaagcagctagaccatccgctagtcattccttttgtaggtcaagaagctttagcagaggtttgtcgcctgatcgcttcgaattttaatcaggcagcagttgacatgtttttttgctcaacattttcagagaatgaaagggagaaaagtcaaccactctcattctcgcaattttattcaagagtccagcaccctgattacatagaaataatgagacactctctctttacaagccatatgcagccgatcatcacgcttgctgatcagagtattacaggatatgagtttttaatgcgtcctgcgagtgacgactatcttttttatcctaacgaattatttgaaatggcaagacaatctggtcttcagtcatttcttgatagtgccgctagaattgcttcacttaaagtaagcgcctcccatctagaaaatgggatgaagcgatttattaacttcttaccatcctccatttatgatcctgctcactgtcttcgaacgacgtttcaagcagtgaatgccttcaagattgatccaaatgatcttgtgtttgaagtagtggaaacggaaaaaattaatgaaattgatcatttgaaaaagatttttaaaacgtatcaacaagaggggatgaagatggcgctcgatgatgttggatcaggttttgcaacaagagaaatattattagaattaaaacctgattatgcaaagattgatcgaagtttgatttcttatagtgaccaggaccctgttaaacagaagcatttaattgagatggtttcgatttcaaaagaggaaggcattacgttgctcgctgaggggattgaacgaaaagatgaagttgatttttgtagagaaataggaatcccacttggtcagggctactattttggacgtcctgcaaaggaacccgttacagctattcaaatataaagtggacagacatgactaacttcgagtgagtgacgcttatgatcaagagattaataacttctcatactactaaggaaaagaagggggcgcccttctttttcttatggaaatttagagtgaaaaccgatatgcttacgacagattacaaaattgaggtgacggaatgttaacgttttatcaacgctatgcgcgtacagcttttgatattggacttatcgtactaaccgtgtttctaataatgttagtatctagctttttatttgatattgcagcaccaattatcgtagggtatgtcatctttttaatcattgaacctttcgcacgttttttacatcgaaaaggaattgggaagacagccgcaacgaccatttcaacgctcttatttgttcttgttgtattaagtgtcgtctttctagcgggagctatttttgttcttcagttacaaaatctaatcagcttaattcctggatatgttgcgaagtttcaagatcagattatgaattatatcgaatggggacagcttcagatgaatgctcttccacctgatgtacttgaaaaggcccaggacttttcattaactcttgtagaaaaggcatcgtttatgctaactgcattcttaaatagtgtgtttgcctttgtaacttcaatcccaacactagtgattaatttcattgtcggtatcgtacttgcttattttttaagtatcgaaattgaaatgtggaagcgaattgcggcgaaacgcacgccgaatacgtttaagaccgcatacttcttcttaaaggagaatgtattaagtgggattggagcttacttaaaggcacagttaaagctcataacgattacgtttgttctcgttctatgtggattatggatcttgcgagtagataatgcgtttactcttgctctattatcagcgttttttgatttattaccccttctcggtgtttcggccattttcataccgtgggctatttatctatttgcgatagggcaaacatctcttgcagtatcgcttttaatcttgctagcggttgtcatgcttgtgagacagattatggagccgaaaataacgggtgattcccttggtgtgtcagcatttacaattctatcctttatgattatttcactctcattatttgggatttcaggagttattatttcaccgattttactcatattgattaaagctctttatgatcacgggtatttaagtaagtggattcatcttcctagtgaagaattttcaaatccacaggatgatagacggtaggaaggaagaacgaatgtgaaacgaacgggaagtttaattatcgtaacgattatcattagtggtgtgattggcttgattttaaaacagtcaccggattctttttctcagccattaaaaaaatccgaggtgccagaggagtatattgatctctaccgtgaagcaggagatgaatatgatgtgcaatgggagcttctcgcggctgttcatcgtgttgaaacaaagttctccacgatgtcgacattagaaagtccaaaaggggcaattggccattatcaatttatgcctctaacctggatcggctggagctatggcggtagccgtcttggtgaactcgataaggatgatttagtggatattacggatttagagctgattcaaaagcacggtggatatggaaaagatggaaacggtgatggaaaagcggacccttataaccttaaagatgctgcgtatactgcagcgagctacctttcagccaatggagctagtgagggaagactggaaagtgcgctgtttgcttacaatcaaagcgatgagtacgtcgaagaagtgctctcattttataatgaatataaagaaaacgctacagtggtgaaattagatccttgattcaatgtaatggtacagtgctttcacatatgataaaatcacgattagaagggggcgattgcgtgaagattgtttcaatcgaaccgacaccaagtccaaattcgatgaaaattaatttaagtgaagagttaccagctggagacacgaggcaatataaacttgagactgatctcacaaatgctccagcgtatattcagaaattaatggcagttccaggcgtgaagggcctttatcatgtgatggattttattgcactagaacgaaacgcgaaatacgcctgggaagatattctcccaggtgccagagaggcgttcggtgaagctgttgaagaatacaaagcatcagagcagtcttctgaaggtttcggtgaaataaaagtatcgatccaaatgtttcgtggcatcccgatgcaagtgaagctagaagaaggggaatctgaacagcgctttggattacctgagcgctttatgcaggcagcaatgaaagcctcatcagcttcagaaaatatggtgatggagcgacagtggaaggaacaaaatccaagatacggttcacctgaagagatcggacaagaggttacagaagaaattgcggcgacttacagtgaagagcgacttgaagcacttgtaaaagctgcattttcagatcaaagtgaatcaattaagcaggagaaaaaagtggtcacccttgcgatgcttgatgatgctgactggaaggtcagatacgctgcacttgaccgtatggatccagtgctcactgatttaccagtgctagaaaaggctttgcaggatgaaaaagcttctgtacgacgcttatcagtcgttttccttggtatgatcgaatcgaaggaagtgcttccgcttctttatcaagcattgaaagataagtctgttacagtaagacgaacagctggagattgtttgtctgatctaggttttgttgaagccattcctgaaatgattgaatcgctacaagatcgtaacaagcttgttcgatggagggcggcaatgttcttatatgaagtaggagacgaaacggcaattccggcacttgaacaagcggtaaatgatccggagtttgaagtaaagatgcaggctggtatggcgttagagaggataaaaggcggagaagaagcaaaaggatctgtctggcatcaaatgacgcaagcaagaaaatcaaattaatttcacaggaggtataggatatgaatccatacgaagaatatatgcgccagatggcgcaaccaatgcgtgatgaattaacatcagctggttttgaggagcttacaacaccggatgaagtagcaagctttatttcggagagaaagggaacctcacttgtttttatcaattccgtttgtggttgtgcagctggtctcgctcgccctgccgctcgtgaagcgattgagtacgaaaagaaaccagaacatcttgtgaccgtttttgcaggacaggatcgtgaagcaactggaaaaatgcgtgaatatctagaaggatatgaaccatcatcaccttccattgcccttctaaaagatggtcaggtacttcactttattccaagagaagaaattgaagatcatgatgtggaagaaatcgtagcaaatttgacaggagcttttgaacaatattgttaataacaaaactccactcatctgagtggagttttgctcgagttaataggaggtcgataaaatggatcatgtatttgaactgcaaggaagctggaagggtggcctttctggtgaggggatagtaaaaacggaaaaccttacgacagacgtctcaatcccctcgtcaatggggggaagtgaaagaggaacgaacccggatgaattgcttttaagctcgtcagctgcctgttattttatgacgattggcttgtatttagagcgaaatgaaattccttttgaagatattaaaatctcatctaaattgaccgtaagtgataaaggaaggcttcacgttgcatctattcatcattatccagtcatctacctgtcaaatgatcctaatgaggcaatgacttcgcgaattcatgacattgcccatcgagcagaggaaggctgtatgattacaagagcgatcaaaggaaatgttgatgttgtcgtagaaccatctattaaaaaagtgtgatgtttttcactgtaatcgttcatttgttttgataagctgacaaaacatgcctgtcctaaccatttagatcatattatgaatctcaccctttgcatttcttgcgaaaatcattataataaggttttggaacggaacagtaacgggcaaaatggaaacagtgaaataaaggagatagaagcatgaataaagactatcgtgtattattgttttataaatatgtacaaattgatcaaccggaagaatatgttgaagaacaccttgctttttgtaaagagcataatttaaaaggaagaatccttattgcggaagaaggcattaacggaacgctttctggaacatttgaagaaacacagcaatatatggatatgatgcatgcggatgagcggttcgctgacttgttctttaagattgacgaagcttctgaacatccatttaaaaagatgcacgtccgtttaagaccagagctagttacgcttcgtcttgacgaaaaccatgatccaaaccaggtcggtggtaagcacttaaagcctgctgagtggcgtgaagcgatgcaggaagatgatgtcattattcttgatactcggaatgattacgagtatgatgtcggtcatttccgcggtgccattcgtccagatattaagaatttccgcgatttgcccgagtgggttcaggaaaatcttgccgatcaaaaggataagaagattcttacgtactgtacgggcggaatacgctgtgaaaagttcacaggctggatggttaatcaaggatttgaggatgttaatcagcttgatggtggtatcgtgacgtatggtcaggatgaagacaccaaaggggaactttgggatggacagtgctatgtgtttgatggccgaattactgttccgattaaccaaaaagatcatgttgttgttggtagagattacttcactggtgaaccgtgtgaacgctatgttaattgtgcaagccctgaatgtaataaacaaattattacatcagaggagaacgaacataaatacttgcgcggatgttcacatgagtgcagaacatcacctcgcaaccgttacgtagctgaacatggtttaacgcaagaggaagtcaatgagcgactacaaaaattaatgcaagagcatattgaacaagaggtttaatcaaaaaagctagctgtctgtagacagctagctttttatttgtcatatctgattttatttactttaagaaggtgatccacttttgaaagacgatggtcttctattttttcgaggtattgatgaagcgttaactccatttggcaaagagcttgaaataggtcgcggtgccgcaactcgcgattttctgcagatagggcagtatagcctgtcagtatgttcggtagctcagttgaaagcatccgctttacaacatggcgttcctcaaggtcaaggggctcaagttcaggtaagatttgacgaaaaaggtgaatgagtcttgtcgctctagaatgaataacgccgctaatataagcgtgtgtagccacttgctctaaatgatttagttgttcttttaacaccggatcaattgctccttgttcttgcgatgcatttgtacctaataaggcgtgatctaataatttcatgcgctgaaaaatccctttaaaaaaaggagagcgtttaatacttcgtttaataattcttcctcgatcattaattaaaatggtaccctgcttgcatttacctgtatctcgttttgcgatcatttgtcgttcccattgaatgtaaaactttttgggtgtagacgaacgatctttttggctgtcatatccagaaaataaaataaggtttcgtcgtatttttaaataaacagtaaatcctcgttctgtacgcttccatttttgtggcttattttctaaaggatcgagtttatcaataaattcatctaacaactgttccgcatatgaaaggaagttcgttgtactcgcatcctgaagtagtgatgcttccaccgtcttgaattgcggtggtaacagcttttcaagccactggggttcagaagaatcgaaaagccccataggattccctcctgtcattaaagtcgatcggctgcatcagaaagctgcttttgtctcgacgttgtgctatccaatttggttttcatttctttgtttagctgatccatttctagtatgaactttttaccgctatcaataatacggacatttgatttctctgtaatctcaatggcttcaaatacatcctgataggcttttcggaaggattcaattgcaatggccggtttctcaagtgttttgaccgtttcttccgtattttgctttagcatttcagcatttcgaaggagcattgactctgttgcttcgttaacattttggacagcggaaatcactttctgctggttgccaagtgctagctggattgaagctgtaaccgtgatgatgttcttcgtcatcgtaacggcattaaagattgcttcctctagcttttcattattttccatgatcaaatcgactgaagccatagactgacgtagaaccatgacagcctgtgacatattctttactcgactaactactttttgttgcgctttttggatcggaaggggattatctttccattcggtcttagccgcttcctcatcaagcattgtcatgagcgtctgacctagctccatttgatcttctaagccgaagattcggtctctagccacatccttaagttcttttaacatcacattatcttcttgtagcttatctttaccagttagaagagactcaacaatgacttcaacctgggattccaccgttttatatttcttcgcatattgctcaacttcattacgacccatgacgcgatttagcagtttattaaatttatttttctttaagtaagagggctcaagctctgaaacatgctctctaagtttgtgaagattatcaggtaaatcgttattcggttgatcaatcattcctttaacgggccgctttaatgcttctaatgactctccagcatcacgctgggcatcttcacctagcccagataaggattgaagtattttatctgtatcatcttcatgataaaagctttgaataatttcctcagctttttcacgttgagagttaactttttcaggctgattactcatatatgacactccttcaatagaatgaaatcgtttggttttgcttcctaccattctatacgaatagatttcgcgaaaagtttcaaaacaccttcagcaaaacctttccctttgccaaataagtacaaacgtatcgcgtgtaaaatagttgaaagatgatgagaggggtgatatgttttaaacggatttattttaatgttaggacgtgatgaaagatgaaaaatgtaaagctctatacccaaccagcatgtccgccgtgcgagtttgtgaaaaattattttcaaatgcacggtgtcaaatatgaactgttaaatataaaagaaaaccaggcagcacggaatgagctcatcaacgatcacggttcaatgtccacgccaacgatcgttattgatggtgaagtgattattggatttgaacaagaacggattgatgaacttcttgatctttcgtcttctaaaatgaaggattgataacttgttgaaagagggtgcatgaaatgattgagagatttgttcgaaatgatcgtcagaaagagctccttcatctagctagtaagcatcgcgctgagcttaaagagagcgctgagcaaattgacgaggaagcgcgcattcctgactccattatagcaagtatgaaggattcaggctttacttccctgcccattccagaagaatttggtgggaaaggactttccctttacgaactagtccttatccaagaggagcttgggaaaggcgaaggagctggcgcgttatcgattggctggcattttggtattctaaaagatcttcatgaccgtcgaccttggaatgataatacgtatgcggaactttgtaaggatgtattgaaaggacagcttgtgaatagagctcaaacggaagaggagactggtgatccaacgagaggaggactccctgcaaccattgctacagaagtagaggggggctatcagcttactggccgaaaaacattcaccacgttaagtccacatcttgactctgtgattgtgaaatcgacgttaaatggtgtgccggctgactttttagtatcaatgaatcaaaaaggtgtatcacttgaacaaacatgggacgttttaggaatgagaggaacgagaagtgatgatcttgtcttaacagacgtcttcgttccgtctgaagctcttcttgaaatttatgacaaggaacgcaaaacggcatcacttcctccggcgtggttacttcatatccctgctgtgtatctggggattgctgaatctgcacgagaagaagcggtgaaattcgttacttcttatcaaccaaacagtcttgatattccattaaaagatgttccccatattcaagataaatttggtcgcatatcacttgcgctcttaagtgctcgtcattttctttattcggtggcagagcagtgggatcagtatccagaagagcgaatgaacatgcagggacagctttttgctgcaaaaacccaggcagtcaaagctgcgatggaagctgttgacctttccatgcgcattgttgggggacgaagcttaatgaaaaagaatcagctggaacgcttgtacagagatgtacgagcgggacttcataaccctcctagtgatgaattaacgctacaagttcttgcgatgaagcaattttaagatgaatatttactccttctataattggaaggagtttctttttgttcttataaatggatctcatccctttgactccctattgtaagtatgcttttcttcctctatcctttatgacgtgttaaaagctactgaaaggatggggtgtatgaaaaagttggttattacgattttaatgactagtctcttttttacgatgttttctgctcagtctcatcaggtagtggcggttactatgataaaagcacctccgatgatagaagaagagcaaactgcaattgcaccaagtgaaacgcctgaaccagaaacgaagcaggatgtggcactattgcttaaccttcctgttaaaaatatgaatgatgttaagaaagtaacgaaggatcaattttccgttaccaactattcaatagaagaaattgaaatgctagccaaattagttaatggagaagcgagaggcgaaacgtttgaagggaaagtagcggtagcttctgtaaccattaatcgtgttctttcttcaaaatttccaaacagcctaaaagaagtaatctttgaaggcggcgcatatacggccgtatcagatggtcaatatgatcagcgtccaggaccagagtcctacaaagcagtttatgctgcacttagtggacaagatccaacttcaggcgctttgttttattataatcctgatatcgcaactgacgattggattcggacaaggcatattattaaagaaattggcaaacatgttttcacaagataaaatcctcctgacgaaggaggattttatgatatcatcaacttgtacccacagtttgatgaaggagtgaagcgaaaaatgacacagaaaaaaacgtttcaaccaggtgaaatagtcacagcaggatataagacaggtaggtatattggagaggttgtagacctaaaggatccaaaagctgttgtcaaagtgcttgcggtgatgaagcacccaacacagggcgatcttcataatccaaaacagctagatgttcctcttttccatcagcgtaaagcgctcgctgaatttgagaaggctcttgtgccgttatcagccattaaccactatgaaggggacgttcctaattacaacgaatcgttgcgcgacgcccttggcacacaagaagctgagttaaagcatgaaggcggaaggtgggcagaggcctctctcattgaaattgaaaagcttaaggaagagtattttccggcaagatagtcttctttacatcactatctaaatcgggtaagatatagtattgatttaggcttgcaataagaagtcctaagtgaagaagacgtaaagggtggtttttgatttgcaatcagaagcttcagcatatcaagtgctgttatattatcagtatgtagaaattgaagatccagcttattttgctcgaaagcatcttaagttctgtcaatctttgaatttaaaaggaagagtgcttgtcggtacagaaggaattaacggaaccgtttcaggaaccgttcaggatactgagcggtatatggaagaactaaaagctgacgaacgcttccacgatatcgtttttaaaattgatgaagcagatggtcatacgtttaaaaagatgcacgtccgaccacgtgaagagattgtttcattaagacttgaggaagatgttaatccgaaagaaattaccggaaactaccttgagccgaaggagtttatggaagcgctagaagatgatgatgtgatcgttattgacgctagaaatgactatgagtatgatattggccatttccgtaatgccattcgtcctgacattaaggcatttcgtgatcttccagactggatcgagcagaatcttgccgaccaaaaggacaaaaaagtattaacgtattgcacgggcggaatccgctgtgagaaattttcagggtatttattaaagaaagggttctctgatgtttctcagcttcatggtggtattgtcacgtatggtaaagatccagaagtacagggcaaatacttcgacggtaagtgctttgtttttgatgatcgccttgctgtacctgtgaaccgtactgatgaagatacggtggtagggaaatgctatcattgcgaggaaccagcagatacgtacattaattgtgcaaatgttacgtgtgacaagcttcatatcgtttgtgattcttgcaaagaagaacataagcaatattgttcatcagcttgtgaggaagaagttcacatggcgcaaatgtaacgcagcggataccgttgcgtttttttttacacttaaccagggtgaggaggtacgtaaaggtgtgtttaattgctgtagccataaatgctcatgaaaaatatccttttattttaatagctaatcgagacgagttctacgagcggccaacaatgcctgcgcattattgggaagatgtacctggtttactaggtggtcgcgatttgaaagcaatgggaacatggcttggcgttacaacaaaagggaaaattgcggcgctcacaaattatcgagagcctggtgaagaacctaagaaccattcaagaggcgatttaactgctgattacttacgacagaatcaatctgcagaggcatatctaaaaaccgttcagctaaagaaagagcagtacaatgggtttaatttacttgcgggagatttcaatactctttattactattcaaacaagcagaaccaaatttccagagtagaaagcggcattcatgcggtaagtaatcatttactgaatacgaactggccgaaagtagagaagcttaaggaagagctcacccgctatatacgagaagaaaacgaacttgatcaggaacggctttttgaaatgctctcgcatgctgatcctgcgccagatcatttattgcctgaaaccggggtaccgattgaatgggagaggatgctttcgccggtatatatttcatctgagaattacggtacaagggcgcaaacgatcatcatcgttacacgggatggccaagtaacctttactgagcgattaggaaaggagcaggaaaacacgtaccaatttatcctgaatgaggaataaagtttcaggtgctgaataaattatgtgttacctgtaacttttcgatctaaaataaagtaataggttctagtttcaaaaccagcatacaggggtaatggaagttaatacttatgaggaggggtttttttgaaaagaaagcgtcactatcttgaagatcagcttttgagggaatcacttgatatgaaggagtaccgaaaatatgattctgaaatggtgactaaaaaaagaccagtactccgtgaaaataaaaagaaaaaaccactcattcaaaccacagtataagtgagggagaaattcctcgcttttttttatggaaaagggttgtgttttttataaagcgatgataagataggtcttgtccttgaaaaaaacacatgaaattaagtgttgacgaagtaatggattatatagtattatgatgaagtcgctgtttaatggaggattagctcagctgggagagcatctgccttacaagcagagggtcggcggttcgagcccgtcatcctccaccatttattttttaaaaggatcagcttgattaagcttcaatagacttcgccggtctagctcaattggtagagcaactgacttgtaatcagtaggttgggggttcaagtcctctggccggcaccacacatgcgggtgtggcggaattggcagacgcgctagacttaggatctagtgtcttacgacgtgggggttcaagtcccttcacccgcaccatatatttttttgcgcccgtagctcaattggatagagcgtctgactacggatcagaaggttagggattcgacttctctcgggcgcaccatatttcggggccttagctcagctgggagagcgcctgccttgcacgcaggaggtcagcggttcgatcccgctaggctccaccaattatatatcggaggaatacccaagtctggctgaagggatcggtcttgaaaaccgacaggggcttagtcgcccgcgggggttcgaatccctcttcctcctccatctttgcgggtgtagtttagtggtaaaacctcagccttccaagctgatgtcgtgggttcgatccccatcacccgctccattttgttggcccgttggtcaagcggttaagacaccgccctttcacggcggtaacacgggttcgaatcccgtacgggtcaccagcatcgtttaactaaatgattttttatcgagcatactcaggagagatgctttttttgttgttttcatttcggtacatcttacttggatatcgcatacattgctgtataagagagaggggatggaccgaatgtattatgaagaacatgagcatattgcgtaccactatgacaacactgattcttatcgccagcagccagtagcaccaacatcgagcccacctgcatcaccgcctccaagaccaatgtcttctgcgcaagcaggaacatttgccgttgatcctggctcgattagaagatgcatgtatcgatttacttatatttggatgagaggcggcaattcgttctggttttggccggtattcgtaggacgtacgtctgtatctggatttcgttggactggtagaaggtgggtttatacaggaattagcttaagaagaattgacatgtttacatgctaaaccgtggagcgcttacatgaggcgctctttttcatgacctcattgtgaaaagtagcgtaaacatctggctttttttaatagatcgtgcgaaaataagactaactattgatcttcgaaagtcaggtgcacataatgaaatttcctctatggatgagaaagttatttgtagcatttgtcgctgtaatgacgttaggaacggttattcctactggatacctagctgatgaaaaaaacgagccgtcagagacgtatcaggaggaaggccatcttcttctcgattcgttggacgagccagtagagttatcggaacctacggaagaagaggctacagattggccgacaattgcagcgcaagtttcctctactgaattgcttgcgcattttgtcacttatgcaagtagtcagtcagaagaacagggattatcaaagtttggagaagcgatttcgactcgtgtaggtagcgagtatacggagtcaatcgttccgaaaatgacagaagccattgtagcatccgttgcagatcttgatgttgaagaacttaggacgcttcgtttaacggagtcaccgtctggcggatatggagagcggattcttcatgtgtatagcgaacagagtggagaagatcttctgcgctttcacgttcgaagagatcacccgcctcaggatggctactggtttaactttcactatcatgcagcagatgataattttgaagagcattatgaagtaggtaaaatttattgggataaaaacactccgcctaagtggctctcttaagagaggtgcgcggggtgtttttggttggagagtagtaagggaggattacagcctagatggaacttgtacaatgcattagagatgtttttgaagaagaaccgtttgtcggttcagaaaacccgtttcagcggaaattatttaaagagggaaacttttatccggtttacagggatgaacacaatagttggattacactcgatgatgaaggcgaacagcatatcatagcaacaggggatctgttaaatgatgatttttggttcacatttcggtttcgaatcgcataagaaaaagccgcagcgtgcggcttttacttctttttagggcgcgcattttgcgggcctctttttttattcatcaatagagcgtcttcgccttctttttcaccctggatccccgttttaggatcatatgcattacgctttttcatacaagtgcctcctctacatggattcaccacttagtatgtccgattctcattaaaacatcgggttttcttcgatgaactggtagacgttatcaacaagttcatctggcgtttcgccggtcacacgttcgccgttaacaaggcagtacatttcttggctacatagcgtgcaatggccaagacaggaatattcaaggacgtctaggtccgtatctttttctagtgtttccattgctttatgtgaaccgcttgaaagattgctcatgcaaaattctacaattggattcattttctattcacctcaagttttcctaacaaattcataactgtttctattctaccaagaagggaggaaaatggacaaccatttgcatgaacgaagaaacatattgactattactcatataatttgtaagagaagggtttatttctttataattaggaaaaataacataatgaagtcgatagaggagggtcattatgcataaagcagttattgtaggaacaggaccagcaggtttaacagcagcgatttaccttgcgagagcaaatatggatccgcttgtcatagaagggccggaacctggtgggcagcttacgttaacaactgatgtagaaaatttccccgggtttccagatggtgttcttggtcctgaattgatggaaaacatgaagaagcaggcgctccgttttggtgcaacgatcgaacgtggctgggtgaaggacatagattttagtgaacgtccttttaaactaacaacggatacacttggcgacatcatggcggaatcagttcttatttctactggtgcttcagcgaaacttctcggaattccaggcgaatcagagaatatgggcagaggtgttagtacatgtgcaacgtgtgatggctttttcttccgtggtaaaaaaatcgtcgtaattggtggaggagactctgcaatggaagaagccactttcttaacaaaatttgcatcagaagtaaccatccttcatcgaagaaaggacttgcgtgcatcaaaaatcatgcaagagcgcgcacgcgcaaacgaaaaaattagctggaaactcaatgcttcacctattgaggttgtggccgaaaacaataaagttattggtattaaagtgaaggatagtgattctggtaaagaagaaattgtgaatacggatggtattttcgttgccataggccaccgtccaaacaccgattttcttcaaggtaaactaaatatggacgataaaggttatatccaagtggaacctggaaccaccagaacgaatgttgcaggcgtatttgcttgtggggatgttcaggactttacttaccgacaagcgattacagcagcaggaacaggatgtatggctgcgatggattgcgagcgcttcttagaaggaaacgcatttattgattggagtatgtaaatacgaaagcgcagggcatgtgccctacgcttttttaatggatatcgatatagtttgaatcgttttggatccggtcggctttcggtattttaatttcaagaatgccgttttcgtatttgcccttcacatttttcattgagaagtgataagggagtttgatcgtacgactcgtactcgcgtaggagcgttcttgtttataatatttttgcttatcgtttcgtgtttcctgatattcttttgactcgattgaaatgcgcagtccatctccaagcggttcaaccttaatttgttcctttgaaataccaggtaactctgcttctacgataaaagcagcatccgtttcatataggtcaacgcgaaacgactgcgcaggcagcagattagcaaacggctctttaaaaaaatcatcaaacgtgttcatccaattttgtatagcagggtcttgaaacagtttaggcaatttatcgcctttacccatttgacattcatcctttccaacatttctgatatacagtatgtatgcccatggaaaaggttccttttgggtgttttttacaagagattccgaagttacttctctactttcttcatgttacaatggtcagtagagaattaaaggaggagtacgatgaagacttatttgcagctttgcgaagaaattttacataacggaacaaaaaaatctgatcgaacgggcacgggaacaatgagtgtatttggccatcaaatgcgcttcgatctgcaggagggctttcctgcgttaacgacaaaaaaacttcaccttagatccattattcatgaactgctctggtttttaaaaggagatacgaatgtgaagtatcttcaagataatggggtacgtatctggaatgaatgggctgatgaaaatggagagcttggtcctgtttacggtcatcaatggcgctcatggacaggggcagacggatcgacagttgatcaaattgcaaaagtggttgaacaaattaaaacaaatccgaattccagaagaatgatcgtaacagcatggaatccttctgaagttgatgaaatggctttgcctccatgtcactgccttttccagttttacgttgcggatggtaaactttcttgtcagctttaccagcggtctgctgatgtttttcttggcgtaccatttaatatagcttcttatgcacttcttacaatgatgatggcacaagtgtgtgacttagagcccggtgagtttattcacacgttaggcgatgctcacatttataacaaccatatcgagcaagttcagcttcaacttacgcgtgatacgaaagatcttccaaaaatgaaaattaacccagaagtgaaatccatctttgatttctcatttgaggactttgaattaacggattatcatcctcaccctcatattaaaggagaggtttctgtatgatttcatttcttcttgcaatggatgaaaagcagctaattggtaaagacaacgatcttccatggcatctgccagctgatcttgcttactttaaacgaatgaccactggaaagtcgatcgtgatgggaagaaaaacgttcgaatcgattggaaaagcattacccggacgcgaaaactatctgattacgagaaaaaatctcgaatatgaaggggttactgttcttcattcaattgaagcttttctcgatcttacaaagcgtgaggaaaaagagtggttcgttatcggtggagcggaaatttatcggcaaattctgccgcatgcggatcgactatatattacagaaattcatgaaacatttaatggggatacttatttccctaacttctctaaagatgattggaaagaaacatcgcgagaaaaacatgaaagcgatgagcgaaatgagcatgattttgattttgttgtgtacgatcgtacctaactaaaacaatccccggtgaacttcaccgggggattgttcactatgtttttggaaaggtaaaaccttctccgaaaacatctcgcacatcatgaaccacaacaaaagctttatcatcaacttgctgaatcatttttttaagaagaaaaagctcctgtttgttaatcacaacgtatagaatatcttttgattcattggaataatgaccgcgtgcgttaatgactgtaacgcctcggtccatttcttcgcttactttttctgcgattgcgacggtgttttttgaaataatggtaacggcttttcgtgtatcaaatccatcaattaaatagtccaatattttcgtactaatatagatagaaattcccgtgtacatcgtattttcaattccaataacgacagaagaaccgagaacgactagaatatcgaatacgaacatcgatgtactaacgctccatccaaagtgctggttgagcattctggctacaatcgtagagccgccggttgttccacctgagcgaagaacaagaccaagaccgatcccaatgaacacacctgcaaagacagtaccaagcatgatatcaagaggttcgcccattccctcagtgagctggataaataatgagctaaagaaaatggcaagcattgtgtaccatgttactcgtttgtttagtactttatatccaatcgctaaaagtacagcgttcattacaaagttcgtaattcccggtgaccaatcaagaatataatatagcgtcatggaaataccggttacgccaccttcacctaattcattcggaatcgcaaacaagtttaccccaagcgcaaagaatagcgatccaataataattaaagtgatttcttttccggtgttattcattttatcactccgttctgttcctgaatacgtaggataatatatcatatcggataaagtcgaacaagattgttcaacaatattgttcaaaaaaacaaccgatatgttaaaatgagggaaaagagaggtaaggcgggtcttgagatatgcgaaaagaaacggtcgagcaaaaagtatatcagcttataaagaatgcaatattaaggagacaaattgcacccggaaatcagctgtttgaaagtgcaattgcagcgaaagtaaatgctagcaggacgccgattcgtagcgctatttcgaagttagaagcagagggacttgtcgatgtcattccgaataaaggggcatttatcgttcaaccgacgatggaagagatgattcaggcttttaaaatgagaaaggtcttagaagaattggcaatcagggaagggtactctaaactggtgaaaacacatatagagttgttaaaatctcatacggaggagatgagtaaagcttttgaagcgagggacatgcttgtataccatgagaaaaataaggcttttcatcttgtaatggcgaatgcgagtggaaatcgttatttgattgattttatggacaagatattaaaccaaatcaccatatatatgattttgtatgacgttttcagcgaaaatgatgaaaatgatctcctcgaacatcatcaattgatccagcttatagagatgaatgatgaggcaagccttcttgaagtggttacggaacaccttaatcatagtttagcaaagctcgaggatgacaagcttaaatatcagtcgcttactaaattattctaaagaaagacgagctgtgtatagctcgtctaagtaacttcctttattctgcaggtctcggaccggcatcaagaccagaactttcaactgtcatcataggctttacttcacaattgccgttaacgcgaacttgacaggacagacgtaggttttcttctacaccttttttcttgaatgcttcttgctcaatttctgttagatctccaaactccccattaattacttcaacacggcaagtcgtgcattttgctttaccgccgcaccggtgaagcacctgaactccattatcttcaagtgcaagagttaatttcgttccttcttctacgtcaaatgatccgtgatctggtactgttactttagccaaagaaattcctcctttattaatggttccccgttcacttactatcatatcggaaatttgtacccgtttgaagcactcttttaattgtaaaatttcgtcgaaagatgtgtaaagaatagaaggaagggtaaataagaagtagtaaagatgaaccaggaggaaaaacatggataaaaaatattttactttagaggaagcgaataatttattacccatgattaaaagagagctcgccggattaaagcgtttgaaagcccagtttaatgaacattatgatcaaattgagcaacacaaaaaaacgcttctttatcgccataaaacaaaagtagatgaggatattctatttaagaaagaagctcgtatggagtttatggaattagaagcacaaacgtttatcaataatattatggccctcggtgttgaaattaaaggcgtagatgaagggctaattgattttcctgccgtcatcaatggaaagaaagtgctactttgttggaaagaaggggaaagcgaggtatccttttttcattctgatttaggggggtttagccaaagagaaccgattgaaaacatcattaaagaagaagagcagggctgagatcgatcagtccttttttggaactgaatataaaatttcaattaccgtactagtatagaaaaagaaatattgctcaccttaagaagcaagggaggtgaagcaatgaaaaatccaaagcaaaatcaaaagcatgagacagaatttgcgagtgagcttgcagctgatcagaacaataataagaaacataagaaaaataaaaaacagaaaaagaatgcctaacaaaaagaagctctgaatggagcttcttttctttatgatagtggtagattagttcccttctatctctaaaacagttaaaatagaaagcagactaaagagagaaaaggatgagtatcatgagcttgttacaggctgaatcaatcaccaagtcatatggagaaaaaacattatttgatgaaatatctttttcgctcgaagataagcaaagaatcggattaatcggtgtcaacgggactggaaaatcatcattgcttaaaatccttgcgggacttgaatcaatggatagtggcaaactttatcacgcgaatcaatttcatgtggaatatttacctcaagatcctgtgtttatagagaagaagacgattcttgaaacggtttttgatagtgacgtaccgctttttaatacggtgcggaaatatgaagaggcgcttcaaatcgttatgaatcatcccgaaaaagaatctgctcaagaaatgctgcttcaagcacaagaagacatggatcgtcttcaagcatgggattttagtacacaagctaaaacgatcttaacgaagttaggtcttcatgattttgaggcgaaggttaatgagttatcgggcggtcaacagaagcgggttgcactagcaaaagcatttattaatcctgccgatttgttaattctagatgagcctacaaaccatattgataatgctacagtggagtggttagagcagtatctcgcgagctattcgggaactcttttacttgtcacacacgaccggtactttcttaatcgcgtaacgaatcgcatatttgaattagataagggacggttatttgaatatgatgggaactatgcgacgtttttagaacagaaagcgttgcgagaagaacgtgaagcaaaagaagaagataagcataacaaattacttaagagtgaactcgaatggctaaaaaagggagctaaagcaagaacgacaaaacaaaaagccaggaaacaaagaattgaaaatatgaaagaagtacctgggcgtgcgactgaaggcaacgtagatatggctttaggagctagtcgactagggaaaaaggtgattgaagcaactgaccttacaaaaaccattaatggtcgcacattgactgatcgctttaactatcttgtccttcctcaagaccgcattggtatcatcggacccaatggttctggtaaaacaacattactcaatatgcttgcaggtcggattgcacctgactctggtcacgttgaaattggagtaacagttaaacctggtttttacacccaacaaaatgaaggacttgatgaatcactaagagttatcgagtacattcgagaaggtggagaagaggttcgcctacgaaaaggcggaaccgtttcagcttcccaaatgcttgagcgatttttattttcacctgatatgcagtggacttacatatcgcgattatccggtggagagaaaagaagattatatttgcttcgcattttaatggaagaaccaaatgtcctttttcttgatgaacctacgaacgatttggatgttcaaacgttagcggtattagaagactaccttgctgatttccctggcgctgttatcaccgtctctcacgatcgctatttccttgataagatagcagaacagcttttcgtttttgatggcacaggagagattaatcattattatggctcttattctgattaccttgatgttgtaaaaagagaaaaagaacttgaagcacttgataaaaagcaatcgagtcaaaaagaagacatcgtgaatgaaaagcctaagcaagtgaaattatcctataaagaaaagaaagaatgggaaaccattcaagatacgattgagaaaatagagcagcgcattgaagatgtgaagaatgaaattgcagaatcaggaagtgattttgccaaagtagacgagctctataaagaagagcaggctctttcaatggagttagaagaaaagattgaacggtggtctgagctctcggaaaaaatcgaataagcaataaaaaatcctaccatacacgctggtaggatttttttatcgggtccatttcttttaactaggagtattgtgaaaaactatgaaataatacttcacaatgtctttagaatattttgagaaacgaagtaaatagtggtataataattcagaaagttacgaatctagagagaaaggagaaaatttgtgaagttttatttatcggtagatatggaaggaataacaggacttgttgatgactcgtttattgattcgagcaagcgccactacgaacgcgggcaggaaatcatgacaaaggaagcgaatcatgtgattgaagcggcgtttgggagtggatgttcagccataacggtgaatgatagtcattcaaaaatgaacaacttgctttttgagaagcttcaccctgaagcaaggctcatttcaggagatgtgaaaccttattcaatggttcaagggttggacagtacatatgaaggaatgggaatgattggttatcatgcacgagcaggcactccgggtgcaatgtctcattccatgttccacaatgtaaggaatttctacataaacgagcaagttgttggagagctggggataaatgcttacgttgcaggatattttggtgttccagtattatttgtcgctggtgatgatcgagcagcacttgaagctgaacagctgatcccaaatattacaactgctgtagttaaagaatcgatttcgcgatcttctgcgcttttattctctccccataaaacagagaggattttgcgtgaacaaacagagaaggcgtttatcaacagacacaatgtcgaaccattagtgcctcctcgtgagcctgttcttcgtatcgaatttaccaattatggacaggccgagtgggcgagtcttatgcctggtgtcgagattgaaacagaaaccaccgttaaatatcaagcgaacaatatgcttgaagcctatcaagccatgcttgtgatgacagaattagcatctagaacaacatttagctagaaagtagggatgcctgtggcgaaatatattgtaaatcgtctcttcgccatggtgattacattatggatcatcgtaaccattacgttcttcttaatgcacgcggttccagggtcaccatttaaccaggaaagaaacaccagtgaagcggtgcagcaaaatcttgaagcgcattaccatttagatgaaccggtctttattcaatatgcgatttacattaagtctcttgcaacacttgactttggaccatcgattaaacaatcatctacctccgttaatgaaatgattgggagagggtttcctgtctcagcagagctcggaataacttctcttcttattgcgattatttcaggcataatacttggaattatggcagcccttcgtcacaatggggcgattgattatatggccatgacatttgcggtgattggaatttccgtacctaacttcattatggcgacactacttattcagcagttagccgtaacgtgggagattttccccgtagctacgtgggcgtcgccaatgcatatgattcttccatcaattgcgcttgctacaggacctatggccatcattgcgcggttaacgaggtcaagtatgatcgaagtactaaatcaagattacatcatgacggctcgtgcgaaaggaatgaccacctttcaaattgttacaaagcatgcacttaggaatgccttgctaccagttatcacgattcttggtacgcttgttgctggtgtattgacgggtagttttgttattgaaaaaatctttgccatccctggaatggggaaatactttattaacggcattaatgatcgtgattatcctgtcattatgggaacaactgtcttttatagtgccttcctcataatgatgctctttattgtagacattgcttacgggatattagatccgagaattaaactacataagaggggggaatagcatgataccagagcgaaaagaaatgaaacaggagttatccgatgacctgtttcttccggtacaaaacccctcttctaatgcagagatgatcgcgaaacctagtatttcctattggaaagatgcttggatgaggctttctgggaacaagctatctatggctggacttgtgatgctagttttactcgtattaatggcgatatttgggccgttattaacgccttattcctatgatcaccaggtgctaacagaaggcaatctaccaccttcttcagaacattggttcggtacagataatcttggacgagatatgttcacacgaacatggaatggagcaaggatttcattattcgttggatttatggcagctattatcgatttcatcattggagtcgcttacggtgggttttcgggatacaaaggtggaagaacagacaattttatgatgagaattattgaaattttatatggtcttccatacttactgatggtcattttattaatggtagtcatgggacctggattattcacaattattatagcgctaaccgttaccggttgggttggtatggcaagaattgttcgaggccaggttcttcaattgaagaacgccgagcatgtactagcatctcgaacatttggagcgcgtgctggtcgtgttattcgaaagaacctacttccgaatacaatgggaccgattatcgttcaaatgacgctgaccgtacccacggcgatctttgcagaagcttttttaagctttctagggctaggtgtacaggcacctgttgcgagttggggtgtaatggcgaatgatggattgtctgttattttatctggtcactggtggagattattcttccctgcattcttcatttcattaacgatgtttgcttttaacgttcttggcgatggtttgcaagacgcgcttgatccaaaattacgtaagtaaaacctcattttcatgaggtttcactgataatgacattttaagggggaaatttatttgaagaaaatcgtaacaatgctactttccttgttgcttcttattggcatcgttggttgtacaacaacggaaaatagctcatcaaattcaaactcaggaagtgacgacgcaacgcaagaagaggatgcgaaggtacttaagctgaataatggaagtgaaccaacttcatttgatccaccaattggctttgatagcgtatcttggaacgcgttaaacaacttaatggaaggtttaacgcgtcttgatgagaaagatcagcctcagcctgctgctgcaaaagagtgggagaaatctgaagatggcaaaacgtatacgtttcacctacgtgaagatgcaaaatggtcgaatggtgagccagttactgctgaagattttgaatatgcctggaagcgtctagcaaatcctgatacggcatctccagccgcgtttctctcttacttcattgaaggagcagaagcatttaatacaggagaaggatcagaagaggatatgatggtaaaagctgtcgatgaaacgacacttgaagtaacacttgaaagtccagttgctttctttcctaatttgatttcaaacccagcctttttccctgttcataaagcgacagtcgaagaaaaccctgaatggcatacggaagcagattcgtatgtaagtaatggacctttcaaactatcaaaatgggaacatgattcagagtttgaatttagtaagaatgaaaattattgggatgctgagaatgtaaagcttgatcaagtaaactgggcgatggttgacgatacgaatacagagtatcaaatgtataaaacaggagagcttcatacttctgatgtgccagctgacttaagcgaagaacttttcagtgatgggaaagctcaagtggaagatcagtctggaacttatttctatcgcttcaaccttgaaatggagcctttccagaatgaaaatatacgaaaagcttttgcaatggccgttgatcagcagaaaatcgtagagtttgttacgaagaatgaagagaaaccagcttacgggtttgttgcatatggatttgaagatgcggcaggcggtgattttagagaagttggtggtgatctcgtcactacagacgctgatcaagcaaaagagctacttgaaaaagggatggaagaagaaggttatgatcaacttcctacagtaaccctaacgtataacacaagtgatgatcataagaaaattgctgaaacgctacaacaaatgtacaaagaaattcttggggtagatgtcgaactagcgaaccaggagtggaacgttttctctgatgaacaaaaacagctaaacttgcagttctctagaagctcattccttgctgattatggcgatccgattaacttccttgaaagtttccaaacagatcattctatgaaccgtacaggatggagcaacgaggagtatgattctttaatttcaaaggcgaaacaagaaacggatgaagcgaaacgtttcgaatacatgcatgaagcagaagcactcctattcgaagaaatgccgattttcccgattcatttctacaatcaagtttaccttcagaatgaagatgtgacgggaattgttcgtcaccctgtaggttacatggaattgaaatgggcggatattaagtaaaagcagggagcccggtttgagtaaaccgggctcttttttataagaagactttaaaggaaatgtgtaaaagggctatagttctaggttcatcattgatagaataaacgtgatgaacgtcgtaaggctagttgaattttaccggatcacgtcctcatgaaaaggagaatttgaatgaagatcacgaacattgaaacgttttgtgtatcagttccattgaagaaaccatttaaaacggcgcttcgaacggtaacagaggctgaagctgtgatggtgaaaataacagcaggggaattagtaggttttggtgaagctccgccaacggttgtgattacgggggagagtctggctagtattgattcaacgatacagcatgtgattaaaccgaaactaatcgggatggacctcacagaatatgaatctatcttccaccaacttcacaatgcattgatcggaaacacaagtgcgaaagctgcggtcgatatggccatttatgaccttgtatcgaaaaaaagttctcttcctttatatcagtttttaggcggctatcggaacacgatgcaaacggactacaccgtaagcgtgaatgatcctaatgaaatggctaaagatgcagtccagtacatagatgatggctttaccattttgaaagtgaaagttggaaaagatacgatccaaaatgatctgaatcgcattagagaaattagaaaacgcattcaaaacaatgcatgtatccgacttgatgcaaatcagggttggacgcctaaagaagccatttatgccattcgccaaatggaagaggaagggctaaacatcgaactagttgaacagccggtacatagaaaagacatagagggattgaagaaagtaactgatgctgtactgacacctattatggcggacgagagcatattttcacctcaagatgctcttcaagtcattcaaatgcgtgcgagtgatcttattaatatcaaactgatgaaatctggagggattcatcaggcacttaaaattaacgcacttgctgagacggctggaatggagtgtatggttggaagtatgattgaatcccgagtaggcatcactgctgctgctcattttgctgcaagtcaacgaaacattactcgatttgattttgatgcgccccttatgtttagacacgacctcgttcagggtggcgttcactatacgagaaatgttatgacttttacagagtctccaggattaggaattcacacaatcgaaaaggatgggatggcaattggaattgactagaaaaacaatcgctgtaacagtagcaactttatggacatcgccagagaaagcacgatcgattgacaagaatgcccttacaaatcctgtgcgtttaatcgactggttggagccattaacttatacagaaagacttgagttatgtgatcaaaatcatgttcaatcacaagttttatacggggaagaagtcattctactcgatcaacgagggaattggtcatacgttctagtaccttcccaaccttcttccaaagatgaaagaggttatccgggatggattcctacggttcaactatcgagtcgattacatgataattattccttatgtgtttcaacaaacaaacatggcgctaaactacgtgacgtgactgaaaacagagagatgctattaagttatcaaacgattcttcctgttatcgatgaacaaaagttggattacgtcgtttggacccctcatggtgagggacgattaaataaggaagatgtaacacttgggagaaagaacgaccaagtgggaactggggatgaacttgttcaggaagctgaaaagtttattggccttctttatttatggggaggcatgtcttcatatgggtacgattgttcaggctttagctataatatggcgaggtctattggctgtacaattccgcgtgatgcacatgaccaattgaaaagtggggaagccgtcgaagaagggcagtggaaaaaaggagatttgctcttttttgcttatgaacaagggaaaggatcggttcaccatgttggcatttattatggagacgggaaaatgattcattctcctagtacaggtcgatatattgaagttacaccacttaaaggaacaatttacgaggaagaattatgtggggtcgtacgttattgggggaaaaattgatgcagtttggacaggtgaaagagaaaatcctagagtgttttcacgggcttgaagggaatcaatcgatttatgtatcgacgcctgatggcgaaatcgcgttacatgctgatcagccagtatcctcagcaagtataatcaaaatcgccatcttgcttgaagcattaagacaagtcgacgatgaacagttgtcaatagatcaagttgtccagatagataacgtgaattatgttggtggagccggggtgataaatcatctttcacgtgaccatcaatggaagttagcagaccttctcaagttgatgatcgtatcttctgataacactgcaacgaatcagctaatcgatttagttggcgaagaccacattaatcatacaatgaaagcggcaggagcctttcattcaaagcttatgagaaagatgatggaccgaaatgctcttaaagcaggggtggacaacatggtaagtgggaaagacacctatttagtattacgtgaatttgttacccagcatttactatcaaaatcttccatggaatggggagtggaggttctattccagcagcagtttaaagataagtttccaagcaaaatttcttctataaaagaaaagcttcttgctcataaaaccggggaactgaatggagtggaacatgacgctggaatactgtttacttctgatggccctgtcgtttatgcctttttaacagcaggcttattggagaatcgttatggtcgagaagccatagcgaatgctggcaggttgctgtatgacttttaccagtaatagatatcgaaagacgctgtccacttttggacagcgtcttttgtataagtttaaggtccaattgttacagaggtgccaattggaatcgtattggcgagttcctctacatcttgattatacattcgaatacagcctctcgagacgtatttcccaattgaggacggatcatttgtaccatgaatgccgtaatggatcttcgaaatactcatccacatcgttccgaatggcccgccaggatttggtgctttattaataataataaactttccagtaggcgtatcgtgaagcatacggccaacgccaacagggtatacctttacagtagatccatttttttgaagtgtaagtgtacggttagttaacgatatataaatcgtataaggaagtgtatttggatccgggtatcctgggatttcaattaactgcccaggatatatgaggtttgggttagctagtgaatttgccataatgatttgcgaaaccggaacacggtagtcgccactaatcgaagataacgtttcacctaattttacaatgtgctgcacaatgaaacctccttaaacaatggaatttcgaagggaaagaaaacaatgaatgtcattattgtttcagatacgcatatgccacagatggcaaagcaacttccagaagttttacgaaaagaacttcttggagcagatctcatcatccatctaggtgactggaaacaaaacaagtttatgaagaattaaagtcgtttgcacctgtaacaggagtttatgggaatgttgacgaagctttttttattgaacaatttaacgataaacttgtcctagaactggagtctcatcgcataggcatcacgcacgggcatggtaaaggaaaaacgacagagcaaagagtaatagctcaattcgataatgaagatgtagaattaattctttttgggcattcacacatccctcttcataaagagtatgaagggagaatcctctttaatcctggatcccctactgataagcgaaaacagtcccattactcctttggtaaattaagcgtaaaacgaaatcaacctctttacatcgagcatgttttctttctgaaaaaatagggcattacgttaaaaacacgcttttgtgcataaattgttgaagtatatccggctaatatgtataatgtttgtataacatatgtgcgaagtttcatatgcggatggaaggggaactaatcatgtcaataaaaaaacgagttatcgtaatcggggctgggccaggggggcttacagccgccatgcttctagcaagcaagggacactcggttacagtctatgagaaacagtcatatgtcggtggtcgaacttcgggatttgagcggggcggctatcgttttgatagagggccaaccttccttaacatgccgcatattcttgaagaaatgtttgaagaatctggacggaatgtacacgactatcttgatttaatcgagattgatccaatgtatgaattgaagttcgatgacgtttctttttatcctacacgagatcaggatgagatggtacgtagaattgaacaaactttccctggcgatggagaaggatatagacgctttatgaaagaagagaaagagaaatttgaagcgcttatgcctatactccaaaataaacatgattctctccttgactatggaagatggcggtttgtaaaagctttaccaaagttaacggtaacggatagtgtttataaacgcttatctcattactttcaggatgaacggctacggttatcttttacatttcaggcgaaataccttgggatgtcaccatgggagtgtcccggagcgtttacaattctatcttatatggagcatgcttacggaatctttcatccgatcggaggactaaataaaattccagaagcaatggctaaagtaatcagagaagaaggtggagaagtttatacgaataaaggtgttaaacagcttctgctggatgggaaaacagtgaaaggcgtggaactcgaagatgggtctgtggagtatacagatgaagttatcattaatgcagactttgcccatgctgtgaatcatctcattccatcaggatctgtgaaaaagtatacacctgaaaagatggagcagaaaaagtactcctgttctgcatttatgctttatctaggtgttgataagaaatatgagttacctcatcattcaatcattttctcttccgactataaaaagaacgtagaagagcttacaaagcaaaagatcctttcagaagacccgtctatttatgtacagaatgcttctgtcacagatgacacgctagcaccagaagggaaatcttctatttatatacttgctccagttccaaataattttagtttagtagattgggaagagcgaaaaggtgattttagaaggttagttcttgatcaacttgaacaaagaacaggattcaaggatattgagcaacacattgaagtagaagaaatgtacacaccaacagactgggaaatggatttaaacgtatataaaggggcaacgtttaaccttgctcataatcttccacaaatgatgtatttcaggccaccaaatcaatttaaagagctaaataactgctggttggttggcggaggaactcatcctggaagtggacttcctactataatggagtcagcacgcattacgagcaaaatgcttcatgaccaggcgatattggagagtgtgaaatgacgatcggtattgtaggtggagggattggcgggatgctttctgcgctcctcctttcacaaaagggatacaaagttgaaatacatgaaaaagcttcatcattaggtggaagacttgcatttatagaaaaagatggattcaagattgataaaggaccgacaattgtgcttcttccagaaatgatatatgagtttttggataaagcaggtattccgagggaagaagtcgagatggtaaggtgtgacccgctgtatcgtatgatttatcctaacggagaaacgtttacgaaaacgagtgatattgacaagcagttgaaagaaattactcgcatgtttcctggtgaagaacagcactttctctcatacatcgaggatatgcgtgaacgatttattaaagggaaagccgcatttcttgaacagtcctttgttaaacggacagatttctttacacctagtaatattaagcttcttcttgaattaaaagcttatcaatctgttcaatcacaagtatcagattattttactgatgagcgattgcaagatgccttttccttacaaacgctttatattggtggtagcccatccgcttcacctgccctctattcacttgttccatttagcgagtatgaacatggaatttggtatatcaaagggggatatgcgagccttattactgtattagaaaaacatcttaatatacaaaatattccagttcacctagaatccagtgtagaggaactactgatagagggtcatgtatgtaaaggaattcgtacttcgagtggcgaacattattatgataaagtagtgtacaatggagattttcctatgattaagcatcttataaaagatgtgaaagcacctagaaagaaatacaaagcctcttctggttgtctgctcctttacatggggctagaccgagtttacgagaatgcagatgttcatcaattttttatgacggataacttttcttctcatatgaaggacgtatttcaaagcggaaaactgactgaccagccagctatttatacattccatccttctcgtattgatgagacgttagcccctcctggtaaaggtgtattatatgttctcattcccgtcccttcaggggaatcgattcaatgggatgaaaaggagcatgtggcctccagaatgattgaacttcttgaatcacgaggatttccaggtttacgtgaggcaatcgaatggatggagattcgaacacctgctgatgcagaggtggaagggttgtacaaaggtggaagttttggaatcgcaccgacgctaacacaatccggtgcctttagaccacaggtaaaaccttttaaatatgacaatctttatgcagttggggcgtcaatccatcctggtggtggaattccgattgtgatgcagggagcggatcttcttgtaaaagaaattgaaagggtgtgaacgaaagatgcttgaacaagcctatgcacactgtgaagccattattaaacatcactccaaaaccttttataaagctttctctttattgccacgtgctaagaggaacgccgtttgggctgtatatggcttttgcagacaggttgatgacatcattgatgaaggcacagatcctgaagcagaactaaccgtctttcgttctgaatttgcctcttttttgaatggacaaatcccgcaaaacgatccgatgtggcttgcacttgaagacgtattccatcattatccaatggaagcaaaggccttccatgatatgattgcaggtcaggaaatggacttatacaaaaccaggtattatacgcttgatgaacttgaacattattcttatcatgtagctagcacggtaggtctcatgcttcttcctatactagcaccacagagagtagatcaactacgagagagtgctatttcccttggtcttggcatgcaaattacgaatattctaagagatatttcagaagatcttgatcgcgatcgtatttatttgcctatcgatgagatgacaaaagcgggttatcatgttaacgatttaatgagtagaacaaaaaatgacgctttcgtgagcgtttgggaaaagctagcttctcgcgccgaaatgcattacgatcatgctttttcagcgatgcatcactatccactagattcacgtcttccagtaaaaagctctgctgtattctataaagcaatcttacaatcaattcgaaagaaagaccataacgtctttcaacaccgtgcttttgtgtctgatcaggaaaaagaagcgcttttatcaggaattgcaggaaactaataaaaggctcaccttcatttagggtgagctttttgttgtcctaaaagctgatataaaaaagagttgtaacatttgtgaaaatttgaaatgattaggtgggtattgctgattaatctttactaagttaggtgccatacaactttacggtgaaatcctgctgttacacggtgaacaggatcatatcgtctcaatcaaaggtcaagaagattattatgcttatttgacagacaaaggaaaaaaggcgcagatgaaatgatataaggatgtcgatcacgaattcacaacattcatgcaaatagactttttaaactggctacaagttcaagcagctaggtgagcgttttgttatgaaagtaaagtgtaaatgaaagtataaggaaagggagatcgtttttgattcatatcgaaaaaaagaaggttattttaagagaagcaacatgggaagatatcaatactttatactattggaagtatgaagagaaaaatcaggaagcaaaaaaatggaatggtccttatattttagaaaaaaagctgtcgagaatagagtatcgaaaagaatggcaaagccaatcgaatatttatccaggcgtcccagatacccttgtcattgaagctgatcatgaagtgatcggaacggttggctcctattgggttgataagtacacgaactggcttgaaacaggtattgtcatctacaaccctctcttttggaatggaggatacggttatgaagcgtataaagaatggataaactttctttttcgctctactgatcttcaccgaattgggatgtctacatggtctggaaatatacgaatgatgaaagtagccagtaaagttggtatgaaagaagaagctcgaattagagaggctcgaatggttgaaggcatctactatgatgcgattaagatgggcattttacgcaaggaatggaaaatgacgcacgtttaaaaagctagagttgaaaatttggaggacatgatgaagaaattaacttatacacatttactaaatgaaacgattgctatatacgaaaagaaaggtagtttggaagcttatcaatttatgaaagaaaatgcagaggaggtagatgggaacgaggcacagctctacaactttcaatatgcgcttgccgctgcatcagaccttaaagaagaggcactaggaatcatgaaagaagcaatcctcgatcatgggtactggtatgaatatgactatttacaagaagacgaagatttgaattccatccgttcatttaaagagtttcaggaactggtggaactttgtaaaagaagagaagaagatgccaagaaggaagcagagccgaagttaacaattctcaatgaaactacaagtcaaaatcaacctattctgatggcgttacatggcgatcaagaaaatgccaagatgacttcatccgtatggaaccgtcccgcgacacaaggttatacgcttgcttttccacaatcctctcaaattcagttctcagatgcttatgaatgggaagatttacaaaaaggcgtgcaggaaatacaagaacatgttaaagaactttcttctcacagctcaattttaataggaggattttccgctggatgtcgcgttgcacttaaagcgatgatggaagaacgtgtatcagtagatggatttgtttttgtcgctccatggcttcctgaaattgatgagtggaaagaagcgatgacttcattacaaaatacgaatataagcggatatatcatttgtggcgatcaagacgatgattgtttggaaggctcaaaagctttagcagccatattagaggaaaaaggcattgctcatgaattgaaaatcgtaaaggggctggatcatgaatacccggaagcgtttaatgaatcgctacagcgcgcgttgcactttcttcataaacgaaagtaagaatggtttttacttcactcgaagataaaattaatctttatggtgaattcattctattactttatgaaaagggagcgattgagaggggagtctatagtgagagaacgggttgggtcatgcacacaatgtaaaaaatcaatttattgtttggatggttttttggatggtgttatatctgagaatcaaaagctatactgctttccatgttatgagagatcagaagtcgaagcatctaaaacttagatggggagcgggttttgattgcaccggtacttagttaaaaactgaagggggaaagataagtgagattgtcagaggaaacgcaatatgttagaagtatctgtttagaaaaaagagaatcgaatgaattccccttttctttaccagctgttcaatcacttcaagaaagactttcttttcatccgaatgtgacatacattgtcggagagaatggcatggggaaatcgacgttacttgaaggggttgccggggcgttaggcataaacccagaaggcggaacaaagaattttaatttttcaagttatgactcacattccaatttacataatttcctaaaggtaacgagaggcgtacatagaccaaatgatttattcttttttcgtgcagagacttattacaaccttgcgacaaatattgaagagctagatctggaggggttcggtccaaaaatcattgattcgtacggcggtcaatcgcttcatgaacaatctcacggggaatcgttctttgccacattcatgtatcggtttaaaggtgaaggattgtatattttagatgaacctgaagcggcgctttcaccaatcagacagctttcaatgttaacgagaatacacgagctcgttctagaaggttcacagctcattatttcaacccattcaccgatattaatgagttaccctgatgcaaaaattcttcagctaactgaaaaaggtatgtgtgatgtagctttagaagaaaccgatcattacgtaacgatgaagcaattttttgacgataaggatcgtcttttgcatcatttgcttaaggggtaaagaagtggaacaaacaagctgaaaaggaacaaacaagctgaaacgaatcggaaacaactaaatgagaagctcatttgtagtcttgtaaatgatgaaaaggagagaggatggaatgtttagtttacaagtaaatgatgaagtagcgttgaagttacttgaaattgaggatgcgaaagagctctttgcgttagtagatgagtccagaggatatttacgaaaatggcttccttgggttgataacatgaagaacgagaaggactatgaacctgttatcgaaatgtggttaaaacaattttcttcgcatgatggttatcaagcgggaattttgtacaatggaaaactagcaggcatggtcggttttcatggcatcgactggtcaaataaaaaagcaagcatcggctattggttagcagaaaaatttcaaggaaacggtattatgacaactgctgttaagggaatcattgatcaagcatttcacgagtatgacttgaaccgcttggaaatccaatgtgggattgaaaataagaaaagtagagcaattcctgaacgcattggttttaaacaagaaggagttattcgagatgccgaatatttgtacgaccatttccatgacaccatcctatatagtcttttatcgagagaatggaagtaacttaactgttggtgcgttattttaataactaaaaacttaaagcgtgataaagggaaccccattcctaatgggttcctttttttagtattcgaacctaataacaataataagattgttataaagaataaaaagttattgttttacgataaatattgttttacaataaaacaataacgaagcgaggtgctaacgatgaatcgaggatctacctattttttaagatcagttgttcttctgcttggaacgtcagttctattattatgtatatttggcttaccgtggatcgctaaagaagcatcaggaaatgcagagtttgcttctctaatctatcctgtcttaataggaatgtacgtagcagctatcccattttttatagcattatttcaggcattgagacttttacgcttaattgataaagacaatgcgttctcggtattttctgtcaatgctttaagggtgatcaaattctgtgcggtggcgataagtgttgtgtatatcatggttatgccgtttttctatttcatcggagagaaagacgatgccccgggagtgattttaattgggctcgtatttatttttgcttcacttgtgattgctgtatttacggcagttcttcaaaaattattaaagagtgccattgagattaaatctgaaaatgatttaacggtttgaggtgaataacatggcaattattattaatattgatgtaatgctggctaaaagaaaaatgagcgtaaccgaactttcaggaaaagtgggaattacaatggcgaacctatcgatattgaaaaatgggaaagctaaggcggttcgtttttccacattagaggcgatttgtaaagcgttagactgccagcctggagacattttggaatataagaatgaagaagatgccgatggttcataaacatgatttggattttagacgatgagagcaatgaaacaactcggtcgttttggtgtggaacaagcgctatcctgcttgtttcctgttgctatcttcgcttctttagccgtcacacaaattatttctttacctttcctaccacgttatgattggcttcttattatttgccttgttatgcagtgggggatggtacgctcaggtcttgaaacgctcgatgaactaaaggtgattacattgttccatatcatcgggctagcgcttgagctctttaaagtgaatatgggttcctggtcatatcctgacgaggcctatacaaaaatatttggagtccctttgtatagcggctttatgtatgcaagtgtcgcaagttatctttgtcaggcgtggagaaggttgcatgttcagctcatcaactggccgtcaaattggatcgttgtaccattatcagctagcatttatttaaatttttttactcatcattattggattgatgtccgctggtggttatctggtctcgttatcattgttttctgtaaatcatgggttacatacgaggttaacgggagtcagtaccgtatgccaattgctctttcttttgttctgatcggtttttttatatggattgcagaaaatattgctaccttctttggcgcctgggagtatcctaatcaaacagaagcctggagccttgttcatttaggtaaagtaagttcttggcttttgcttgtcatcgtgagttttcttatcgtagcaacgttaaaacgtgtcaaaggagaaagtagatccagttggcaagaaagtttatttgttcaagaggatagcgagaaattgcatgagtgattgcagaaaggatagtagatcttatgtcaccaaatgtcgagtgcttaggttgcaaattagccaataaaaaggagcctgttcatgtgatttatgaagatgatcaggtttgttgctttttagatatcgaaccatttaatgaaggtcatacgttaatcctaccgaagaagcattttctagatgtcgaagagttagacccattaacagcaaatgccattatgaaagcttcaatgaaaatttcaaaagcaatcaagcatctattcgctccagatggcattagtatttgccaaaatggtggtcaatttaacgatttaggtcattatcatatgcatttgattccaaggtttcgtagtcaaccattttataatgaaacagaaattgacaataccaaggagaagcagaaccttaaagaaacaaagactaatttaatgaagcaattaaatgttaatcaatggtgaacagagactgatagaaatgtaggattgtataagagtaaaaagctatcatatgactctgtcatggatggctttttttcatcaattgggctacatgctggaatagggaggggattatgattaaagcgaaagctcgtttaagtgtaaagttagcgtttattttgcagatcatatggtatgtcatgttttttactaattttattggagttattgggtcgtggagttcgttactacaaaatatgatatggctgggaataccgttgattggaataattacctctttaatctatttattgaaatttagttttacaagggttgcgcttactactcttaccttatctttgccgatttgtctaatatggattttaatttctggtataagtaaaatgtaattctttatcaattttgaggagtgaggcgagagaaatgaaaatatgcgcctggatgctattagtattacatacagttatcgtatttctttgggtaatgaactctggatatttattttcattttttggtgttgtgatttgggctattttagttgcactaggttttattgtacaaagacagataaatgggcagttgtggataaaagtattattgttggcttcaagttactttctggtagtactgagtgtagttacagttgggatctactttgctacaagttcgatgccgtgattttttctcccataattaaagggattatctctagaatatggaagatttaattaagcatcatttaggaggtagtgaaatggtttttgaaatgactactcaagttcgtgtttccaacatggcagaggggcgtaagtggtatgagacttttttaaataaggaacctgattttattcctcatgagggatttgcggaatgggaactcatacctggatgctggttacaggtagcagaagggaaagtcacggaaggaaatggccctttgcggttaggggttactgatatttcagccgaaagagagcgattaatgcagcacttaaacatggaaaagtttgaaatacattcgaggtcaaaagttccagttaaatgggggacattcacagatccctggggaaaccgtctgggtttttttgaatacctggataagaatgaagaaggaaaacaaaggaaatcgattgttggcctagaaagatgatttttaaaactagatgacgcttatataaaaacaaattgaatttgtgtaggaggtcaattgatgattgagagaattgatactttgtgcatgaaagtaaaaaacgttgagaaatcaagtgattggtacgaagaattattaggtttctcagtagttgttaaggataaaggctatcgcgtattaaggattgggaatggaagtagtgttcctttaaccatcgaagagggagacactacccctaatgctgatcaaagttatcccatcttttattcgaaagacattcaagggttatatgaaaaactgaaggagcataatgtcagagttagtgaactgcattattatggtgtaaatcacttcttcgatttttttgatctggatgataataaacttcaagtttgttattttaaagagtaagaacaagaaacagaatagcctggtatgacaataaagagtagaagagaaaaatggaggcttcgaatggggaagttgtttttgtatagtgatcaaattatcgaatctcctggtaatcaacgattagactcgttactttttaatggaatggaaacggaaaaaattaaggttggttatattccatcaacgcaagataaagataaaaagtattttcgtacaaaagtggattattaccagaattacggtattgcggacatcatgttttttgatttatacggtgaatttacttcaattaacattaacaagctcatggaatgtgacattatccatctttctgcaggaaatccgattgaatttagaaaagcgattaaaaatcgtaaaatggaacaggttttgtgggattattatcatagcggaggaatcattgttggcgtaagtggcggtgccgttcaacttggtcagtctactgcgttatttcatctctttaaaggttcagactgtgtagagtcttctgatgcactaaacatggtgaaatttgaatttctcccccattacaatcgttggaataatgactttaaacaagaggttctagcatactcaaaaagaacgggaacaagaatattatgcgtgaatgacggagatggcgttatagtcgataaggagaatatccaaatgatcggttatattaaagtaattggcggataagtcaaaagctgaatgaatgttagcgtaggacggtctaaaatagcgaagggaaacccataaacggctttcccttcgttttttcatctttattaaaccgtagaacgatcttcttgtataatcttttcagcgacatttttcccactaattacgaccatcggtgatccgcctcctggatgcgtacttcctcctgcaaagtagaggttcgcgatatcctttgattgattcgaaggacggagaaagctgttttttagtgaattcgaggaaataccgtataatgctcctcgaaaagcgtgaaacctttcttgaatctcttcaggtccaatgatcttctcaacaacaagatggtctcgaatcgacagcccgtacttttccaatttatcatagactttttctttataagcttctaaagaaatacggttctcttttgtaagaggcggtgcgttaactaaaataaacagattatcaccgtctggagaaacggaaggatccgtgacagaagaatttgagatgtaaattgtcggatcgtctggccactgcccgttaaatagcgtttcaaactcttgagagtaattttttgaaaagtaaacttgatggtgctcgaggttctttaactttgttgatagcccagccataatcacaaaagctgaaatcgatggagaagaccgctcgattttcttgttaggcattgatggtcgatttttctcatctactaagttcggataggcgtgaagcaagtctccattaataatgacattatctatttgaaacgatgcggtcgctgtatcaattcggcgcgcttttttgttctcaatgtgtatgttcgttacctttgaattgaggtgaaaagtaacgcctagatccttcgctgccatttcaagactttttgcaagcttagtgtttccgccctttacataatagactccttgcaccatttcaagatagccaatcatcgcaaatgttgcaggtgcttgatagggggatgaacctatatatgtcgaataacgattaaaggcttttaataagagcgggtgcttaaaatagcgttcgtgaaaatggttcattttttctagcggccgcacctgaaccacagcgttaaagagaccgggagacaagtaatcctgccatttcgtaaacatcctcggaaagaacgtgctcttagataaatgatagagccgttcgatttcctttaaataggcgtgatagttttcagcagcaaacggatcaagtttatgtagctgagctttcatataagtttcatcggtactcaacataaaagattgtccatcatgatcaacgttttttgtatgatggtcgagttttatccagctgtaataatttctagggttaaggtctacttcttcaaaaatagaatcaaacacttcaggcatggtcatcgtgtttggaccaaaatcaaaatgatgtgtccccattttaacgggcatcattttcccacctgtataagcatttttttcaaaaacgtgtacatcgtatcccttgcttgctagtttaatagaggcagacagtccaccgagtcctgccccgataataccaattgttttcatgagtaagttcttcctttccaaacataacccttctgttttaagcctgttcgcattgaatggatcagaagcgtcataaatgcaatagcgctaagtggcatgagaaatgctagcgttattttctgattcgttctcacatcaatccatagtttttgtaaaacgataagcaggtaggggataaataaagtgaattgtagtgagtctgtcataaaggtataaagtcctatcgttagtagaacaagtggtccaacataaaagagaccgtaaaaaataaaaagcatcataattagaaaccgagagcgtccaagtcctgggaataaatttttcgtgaagccttcccatacttcccgattcgtttgatacatgtagcacgtgaccatgttggtaatattcgccaggagcaccttgcgtccttttttcttaaatgcttttgctaaatcaatatcatcaagtagcgtttcttgaatgctcgcatgacctccaacctgcgtgtatgcatccttatgcaccataataaatgccccatgagctgctgtgaaggaggggagtgttgttccgtttgctggagctataggaaggtggaaatgaacaacaaaatgttgaagtggcacaagtagcttttcgagaaaaaggctgactggaaatgcaggaaaacctgttaacatagaagccttatgctttttcataagaaagagtgctgcttgaatggcgtcaggcgacaaacgtaagtcagcatcattaaaaagcaaatagtctcctctcgcacgttcactaagctgatgacaagcgtatactttaccagtccatccttcaggaagatctttcccttgtataatcgtaaagcgctgatcgtttttcgtatgtttaaaaagtaaattcagcgtttgatctgtagagtgatcatcaagaaggagaacttcgatgtttcgatacgtcagcttttttaaactttggacaagctcactcacattacgttcctcatcacgaagggggacaagaatggatacaagcccattctcgtcccccgtcattttaaggcgtggcatgaacagcgaattaatgatcgtccaaagaagaaatacgccaagaatacatgtgtaaatgagtatcattagacaatcacctcttctactgtagctttttgctgatttattttcttcttatatgttagtaaaagaagtagtgtcggaatagatgttaacaaacaagcaagccagagtccatctagcaatgctaagaaaataaacatccccattaccatcccaaacaacattgccatacgatgtttccagatgttgaaagaagcttgatcgggcacattattccgcacataaagggggtagagcaaaagatggaaaaagagagatacccagaaccatccggtgaaattttggaaaggaacgttataataaacgccatttccctcccaaccccagtagccttttactaaatatgcaactggatcaatgattaaatcaattaaaaccgcaataagcgcgcctgttacagcataaacgatccattttgtatagctttctctcattttttcgatgatttgcatcgacagcacatgcgtgactgcgatcaccataatccatgcaaaaccaatgccaattggaacctcagcaatcttaaacccaaaatcacctgaataatcatattggccgaagattagtccataatggacgccaagaccttctgcgaacatactaatcacaaagataaaggaggcaaaagatagcccccataaagatccgaaagtacgtataaagtagatgctgccgagtattccacaaagtatgaggaaaaaggcatttgcccaattaagaaatgggggaagcaggtcaaatcccactaggatcaacccgcaacagtaccaaaaaataaaaagtcgaaaaatgatattatcccaattcatgctgcgaaggtcctttcttagccagtttgctcatctttcaatttctgatcctccgcaattaagtctgcagttaactgtcctgagagtgtcaccatcggtaccccaccgcctggatgtgttgaaccacctacaaagtagaggttatcaatcaatgaacttctagatgggattttaaatcctccgttcactttacgatcggtagcaacaccgtaaatcgatccgccattagatccatataaatttttaatatcatccggtatgaattggtattcgaattcaatcgattcacgaagacctgtcatgcccattctttctagcttatcaagcacaatttcgcggtatctaccacgatgtttttcaaagctctcgccaggctgaagtggaggaacatgagttaacacaaataaattttcttttccggaaggtgcttgtgtaggatctgattttgaagagacgccaatataaacagttggatcgtcagcaggaacaccttcatcaaagatttgtttgaattcaagctctggatcttttgagaaaaagaaattgtgatgttgaagctgatcgaatgttttattaaccccaagtaacagcacaagacctgatacagtcggtgtatatttttggaggtcctttttcactttttctgctccaggctcgccttttaaaagcgtctcatgtgcaggaattccttcaaggttgctgacaattaaatcagcttccatcgttgttccattcgcaagctttacgccagcggcttttttgtttacagtaagaatctcagctacttctgtattcacttgaacgtcgacacctaattcatcgagaagctttagcattccttctgctatgttgtacatcccgccttcaacataatagattcctagaccaagttggacgtacacaagctgtgataagatagcaggagaatgataaggcgaagaacctatatacataatgaaaaagttgaaaagctgttgaagatgcttatcatcaagatacttttctgtagcctgattcattgatttcattggatccattgtgagaaggtctttaaatgaatgaagcttttgcaaatcttgaatgccagataaacttttcttgtaaaaacttttaaggctcaggtcgaacatcgttttgcaataatctaagtaggagaggaagttggaataatctttctctgagcgtttatgtacctcagataacatgaccgcgatgtcactcgtaacatcaatttgtgcaccgtcttcaaaaaaagttctccactgaggttcaattcgcttaatcgtcatataatcgtttacatttcgattcgcacttttgaacagtttctcgagcacccagggcattgtgagtatggaaggtcctgtatcaaacttaaatccttgaccggaacgtttgtttaatttaccaccagctcgttcgtttttttcaagtacagttacttgatgtccatctgcagcgaggcgaatagcggctgaaagtccaccaaggccagccccaattacgattgtttttttgctcattccttctcctccttcaacatattagcgtcatgaatcgacttttgtacactgtcattgtatagtttaggtataacctttgtaaaggaatcataacgctgttacagtgttaagtatgctttcttgttaattacctaaaaatggataggttaaacaatgttgaagtgaggaatgcatatgcacgttatccacttaaccatcctagaattaatcttagtgaatatttttgcatggctaattattcatgtatctatctcttatatttgccttcgtttgccggattccttttatgaatcaaaaaaaacggggctagagagcaaaaaaaaggaactgaatttctatgaaggcttacgaatacgcaaatggaaaaccatacttcctgatgggggagacgtgtttaaaggtggtttccgaaagaaagagttaaagacacttagttcatcctatcttacgaaattcatcgttgagacaagacgtgcagaagtaacccactggctcctgattccgccttccattatgttttttttatggaatccgatgagtattgggctcgtcatggttggatacgcactaattgttaatcttccatttatcctgattcaacggtacaatcgacacaggttaaaaccattactaagtaaacagttgaaaaaagagcagcgcagggggaattccattggaacatttggggtttgatcaaaccgaaaaacgaaaaaacgagcatatcgacatctgtctgacagaagaagttgaaggagcaggattaacgacaggattagaacgctatcgttttaaacacaatccattacctgaaattgcttatgatgaagtggatatctctacttctttcctaaataaaaaattaaatacgccatttcttataagctcaatgaccggcggaactgaacgagcatgggaaataaataagcggcttgccaaagctgccgaagcacatggctggacacttggagtaggatcgatgcgtgcagcgattcaagaatcgaaatccgtatactcctttgatgtgagaaaatacgcaccaacaatcccggtcctagctaatataggggctgtacaacttaactacggttttaccgttgaagaatgtaagcgagccattgatttaattcaagctgatgcgctattgcttcatttaaacccactacaggaagtgtttcaaccagaaggcgacacagatttccaggatttaattgttaaaattcgtgaagtagcaaaggcgatacctgttccgcttggaattaaagaagttggtatggggattgatgcaaagacagctcagcgcctgattagtgctggggccagctttattgatgtcgcaggcgcgggcggaacatcctggattcaagttgaaagctatcgttctcatcaaacgatgcgccggcaagctgcgaaggcttttgaggattgggggaacccaaccgcggattgcattattgatgtgcgaaagcagcatcctgatgtaccaatgattgcatctggagggctaaaaaacggtgtggacgcagcgaaagcgatcgccctcggtgcagatgtttctggatttggaagggcattacttgaaaatgccgtaaatgacactgaagaagcgctatcagaacaattgaaacgaattgagtttgaattacgaactgccatgtttgggatcggtgcttcgtctattaacaggttaaaatacaatagcgcattacgaaagaaatagtcagggcccaggctctggcttttttgtttttgtataggtcgtcctctagcgtgcaaactagagcaaaaggagggcgaacttattggattggttatctgtgttcccttttatcgtagtgatattagttgcgataaaaaccaagctagtgattccaggtcttacagcaggactattaacggcctcatttatttataagccgggcgtaattagtggtttacaacagttttatgagtttatcatgagtggtctaaaagatgagaataatgttaaaatcgttctttttctctatatgtttaccggattaattggattaatgaaatatacaggtggaattaaagggtttgttcatctagcatcttcgaaaattaatacgaaaaaaggagcattgtttcttacttggatctcgacaattggaacctttagcgctccgagctttcgtattgtaacggtagcaccaatcatgaaagctcttctaaataaagtgaaaatcacgcctcaggaactcggatttgtgattgagacaactgcaactccagtgattgtattgatgccaattgcgactgcttttgttggatacatgtcgtctgttgttcagctttctttaaaagcggaaggcattgaaggtgatggttatcgctatttccttcaaagtattccgtataactttttttccatcagtatcattctaatcggcttttatttaagtttttttcatcacagcaaaaaacaagcgactgatgcagggaatcaagagaaggagctagatgatcagtgggaggattgtcatccagccgtagcaaaagaccttccaaaaaagccgttcaacttattactgccgcttggaggagtcatactgctaactctttttcttacgtattggagtgggtatgaaaaaggctttacctccttacttcaagcattcatcgaggcggatgttcttgatgccatggtatttgctctattaacaacggtgctacttacattccttttttatttattccagcgtttctccttaaaggaactcgtgactttctttattgagggaggaaatgaaatgatgccagtgatcgtattgttaacggttgtatgggggcttgcggcatcaactgaagcgcttggattttcggcatttgtcacatctaatcttgattggattccatcgttatttgttccacctgtcttgtttcttgttggtgcgtttatttcttatttcattggttcgtcctggggaacttgggggattttaatgccgcttggtatttcgctaggccattcaaccggaaccgatctccctctcgtcattggagctgtatttgcgagcggtacatttggggctttttcttcaccgttaagtgataatacgaatacaatagcgagaattttaaagttaaacccgatgacatatgctaaatttaagctaactcctgctctaattgcagcggggacggctgctgtaggatattttattatttcttttgtgatttaacttgagcacttttctattgacaactgttttaataccatttattattgagactaacttaataatcctttgtttaaaggatcttcttattcagagaggtggagggactggcccttagatacctcggcaacggaccaatgaacattttgttcattcggaaccgtgccaattcctgcggcgaaagtcggaaaatgagaagaggctcggtatatccaaaccctcttctgttcgggcagatgagggttttttgtatgcttcctcatctggaaaattgttttagtagagggagtgaacgatcttgcatacactaatggataacgaaactagaaaacaacaacttattaagacccttctccaaaaaggaatctataagaagggtgccaaacagctttatatgttaacactaaatgaactggaaaacatatatgttcgatctgaaaaaatcaatacgataactggaaacggagtggtcaaagtggagcaagcaacatttgcagcagggtgcttttggggtgtagaagcactatttcaacaattaaacggcgttatttctacaacagcaggatttactggtggtgaaaccattaaccctacgtatgaagacgtttattctgagttaacaggtcatgcagaatctgtgcaagttgaatacgatccatcactcatttcttatgaagagctcgtggaagtgttttttgaaaatcataacccaacttctttaaataaacagggagaagatatcggaacccgctatcgctcagcgatcttcttccattcgaatgagcaggcagaaattgcattaattgcaaaagaaaaccttgagcgttccgggcgttttaagaagccagtagtcactcaaattgttccgatcacttcattttatcgtgcagacgaatatcaccaaagttatcttgctaagcgtggacagtcttcttgtaaaatttcataaaacaaaaaagcttttcctcaataatatgaggaaaagcttttttagttaggttggtttacaccgatttgatcaagaaaaatcttcccttttggagaagcattaaattcaaacgtgatggagtcgatctcatctagcttcacaaagctgttttccttcttaaaaagttgcatcggaatgttaaatgtttggaggacgggttctgtaggttcaccgtaacgccgttcttcaaagaattttgttttcgtatgctgtatagggagtgccccgtgcattggcataatatcacttaacattacgctggatgactcaccattggctgagcttacagttaccttaaaatcaaccggctgttgatcttctgcttccgatacgtttgctgcagtaaatgttagtgcgctattcggtgtgaagttatatggatcttgtaacggtttcgtgagatctagtgagtaagatgcatttttagaataggattgatcccatttcaaaaacaccccgtgagttcctctttccttatctctacgaaattcaagttccccttcataccactgaataaagctatttgctgttatttcaatataaggtgatgttgcggttaacacgttaacatcttcctcaaagtcactgaatatatggtaggacggatcttcgtattgactaatgtaagttgccttaggtagccactccagtgcatatcggtaatcctcaaacattggctgatagctttcgtcctcatgaagagttgcttcaagaaaaccggatacgtaagtgcttgaaatttgacgctgctcatcgccttcaagtaaaggctgtttatttaatagtaatgtaaaagggaagtacgtatcattttctccccaggcggtattaaattgtccatgattagcaccatcaatataaagggaagatttcatcgcattttcgctacctgttaattcaataccgttatattggcgatctccttcaaattcagataagtcactatcataagaaccaccaagtaataagtaatttacatcatcaacttcaattttacgatcagagagagtttgataatcggttggagcgagtgcaattacggtttcaatcttgtagttaaagtcaaaacgcatgttagcattgtttggatagcgatcgagttcattgaattttgtcgcaaggatagctgcttgacccccgcgagagtgaccaattaacgcaatgtgatccatatcaactttattgaaaaattgagtatcttgttgtgtcgataacgattcaatttcttcaatgtgttttagtaataaccaggctcggccattaatatctcctgatacaccgcctgaccaagaggagttgaagaaattttcatcaactgatactgttaaaaaccctctacttgcaagcagctctcctaaataattgtagccttgatcggaaaaatcttccattttatgatttccatgtacgataagaacgagtgggaaaggaccctcaccttctggcataaatacacgcccattcagtggaacgttagcatctttaaagccccaaaaccattcccgttctttagaccattctccaatcatgcttgaagcgttaacggaccttgtttggaggtcgacttcattaccgaattcgtctcgttgcttatcagttccgcttccatatgtaaacgtgtttacttcatgcgaaccatattccgaggggttttgactgacgggggaaaatggctctacggtgttggcgaggcgctcatccaaggtaccaggggtaaatagccagtaacagaaaatgcctgttacgaaaacacctaaaagaagcatgatgatagaaagtggtttctttaatcctagtgttagcgggtatccaaagagtgctccggtaataacgccaatagctactaagagataggcaagggggagaatgttctcaagactgcgaaattgatctaacgtgtaaatcgtgattgtaagggaaatagctaaactagcgatgaaaagtgtaggaagttttttaaccctttttataagccactctccaattttcacggctacccatgttccaataatagctattagaaagaaaagaacgacatccactagttttccgagtccagtatgaaaatcaaaaccgatggcgaagattagaagcattgtgattaatgtagcaccataggaagcgcctttccaactagcattaaaaaaagactgtacaggcaaccttatgcgcgtaaatagtttttttactttattctgattatgcgtctctttccgtgtcttttcgtactctggttcctgttccacacgaatcctccatttcattattcacttcttttattatagcaaatacataaagaagagagggaaatcataatggctaatccccgttcatttaattgtcaaatcgaaatcagcaaagtatttgattcttgcttagataagtcgtacaattaatacaagaattaatgtgaagtatttcacaaacatgcgtttgtgattgagataaaggtggggatacggtgaagaacgagcttaaagcatatgcttcaggttttaaaataacgcagctgattatgattttaggcgctcttataataggtgcttcaattattgcacaggcttttcttacagtagaaattgtaaacaacgtttttgttgataaaacagcctttgaagcaaacgtgccttttcttattagtttgttacttgtgttgatgttgcgaccattcttatcttacttaatgggcagagcgggagtaaagatggctgctacagtaaaacaaagaatccgtaaagcgctattagacaaattttcacgggaagcgctactaacttctcatcaagggcaatctggtcagaaggtgagcgtcttgcttgatgcagttgatgagatcgatgcttactatagtaaatacattccacaagtgttcaagacagcagtgatcccaattcttattttaattgctgtttcgactcagcatctcgaaacaggactaatcatgatggtaacggcaccgttcattccaatattttatataattattgggatacgtacccagaaaaaatctgaagagaagcttgaacaaatgactgttttttctggacgctttttagatacgatccagggattgactacgttaaatttgtttcggcagtcaaaaaaataccgaaacattattaaagaaagtagcttaaactaccgtgacgctactattgaagtattaaaagttgctttcgtgtcctctttaatgcttgagctaatttctatgctaagcatcggcattattgctcttgaaatcggtcttcgtctcattgtgtttaacagcatgtcttttgcaacggcattttttcttcttatccttgctccagaattctacctttcactaaaagaactaggcagtgcatttcatactggaagagggagtatgagcgcaatgaagaaggtaagtgaagaactaggtcgtgagagcgaggaagtgacctggggagatcagtttattgaaaatagtgaaactccaccaaagattgccttaaaagacgtttcttatcagtataaagacagtggtttctctttatcttctctaaatataacaattgaaccttatcgtcaggtagcggtaattgggcgaagcggatctggtaagtccacgttattgcatatgattgccgggttgctaccaccacaacaaggtgagattacgatcgatcatcattccatgacaagtttaaatgaaggtagttggttttcacaggtgagctatatctctcagcatccgtatatatttacaggaacgattgctgagaacatacgtatcggatcaaagaatgccagccaatctgaaatcgaggaggcagcggtgaaagctggtatttcagcatttgttgctacactagaacgaggttatgaaacgatcattggtgaatcgggtcgcggtttatctggaggagaaaaacagcgtctggcactagcacgtgcttttttaaagaagccaaatgtcattttgtttgatgagccaacaaccggacttgatttatatacagagaaagtacttcaatcagccatgaattcattatctcaaaacgctacaattatcacagtagcgcatcgacttcataccattcggaaagccgaccatattattgtgctcgatcaaggaaaggtgatggctgaaggtactgacaaagcactttatgagtcaagtgaattatatcgggagatggtaaatgttcagactgaggaggtaaccttatgagagaattagcatttgtttggcgtgaaatgctgacagagaaaaaagatatccttctttccatcttatttggctttattgctggtataacagctgttgccctctttgccgcaagtggatacttaatttccaaggcagcattgtcgctacccgtcttcgcattagccattttaacagctgtcgtgaaattctttggacttgctcgtgcagtaggccgttactttgaaaggatttattcacatcgtgccacattttcaatcttaagcaacatgcgcgtatcattttataaaaagcttgaaccagttgcagcgagcttatctcagaaataccgaagtggggaattgctagggcgaatcgtaggagatattgatcggcttcaacatttttatttgcgtgttttgtacccaccgatcgtatttattcttattttccttgttacaatttggtttacactattcttttcaattaaaattgcaagtttaatgctgttaggtgtttttcttactgggatattaattcctggttacttcgcttggcggattcggaaaaaagatcaggccgttcgtgcatttagaggcgaatttgcagctgattcggctgagtttttcaatggctttcgtgatctaaaaatcatgagagaaaccgagaagaggaaagaagagcttgaagcaaaatcgagcgctactttaaatgcagaaagtaaagaaagtaaggcggaagtttttcatcaggcggttaactcatttatctctttatttgtcacatggtgtgtcatcgcggtgggtgcctatcttgttacaactggagaattggatggactatttctcgccatgcttgtccttatctccttaacgtcgtttgagaatgcggtgccgatggcgatcgtgccggcttatttacaagatagcatcgtagcatccaaaagactttcatccgtccaagcggtaacgtcgaataacgttaagaaaacagtaaagcttccagaagaaaaaccgttctcgctattagcgaaaaacgtaactttctcatatccgggggaagaaagaaaagcactgaagcatgtatccgttcatatcccagcaggggggaaaacggcgattgttggtcctagtggttctggtaagtcaacgcttttacaacttttccttcagttctatgagagcgggggactagaagtgaatggtgattcgacccaaatgctttcacaggaagaaatttggtcggaaacaaatgttatccttcaacaaaaccattttttctcgggctctattcgtgacaacttgaaactcgccggagagacgttaaccgacgaacagttaacgaatatccttgctattgttcaactcgatcatctttctcttgattacaaggtccatgaaaaaggcgccaacctatccggtggcgaacagcagcgtcttgccattgcaagagctctgttaaaaggaaagcgtgtctggttattagacgagccaacttcctcggtggatcttttaacagaaagattgattcttaaccatttacttgatcgggccaaagaagatacgcttcttttggtcagtcatcgactgaacaatcttgaaaagatggatcaaattatcgtgatggaatcaggtgaaattgttgaaagtggtacgtacaaagaattgatgaaaagtaagggatatttttatcaaatgagagaaatcgaaagaagcgtactcttgtaggattagcttccaatttactgctgttattcaacagtaaattggaagttttttttgaaatcctttcaaaaaagaggggaattattctttttatggaattttatagaagtatgataaaaggagggatttttagtgttaaatcatgtttgtgtcttaactgttaaagtgtcaaacctgaaagaagcattagcgttttacacggaaatattggatttcaaagtatcaaaagagtacggtccgaaaattgtgagtcttcatcatgaaaatatcccaattgttcttgaagaagagccagttcaatctgaaaacaacaatgttctgcttgccatccaatctaatgatatttatcgagattttcatcagtttaacgaaaaaggtgtgccgattctttctaaagaacctaaaccatgtccaccaggcctttactttgtcataaaagatccgtcgggaaatcatattgaaattctacagtttacgaattaattggatctaaaaagtgtttaactcatttatatggcgttctgctgttcaatttcttttaacttccctaggaattctattaatcggatctctaccttatctcttttttaacatgaagcaacagcttgaaattcttgcgatgattgatgaaggtactttatcaaacacattgtttttatatgattcgatcgtttttaacgttgaagcttatattaatcaaatcggtcaaaccgtaaagatggtatttaacgaccagacgatgcagtattatgcaagaggcggtagtttgccgctatttcctgacttatggaaagcttattcactttctatgtcttatttgctcgcttcattaatgatctctatgcttatagggattgttttgacgataatgacgatggtgtttccaaaaagaataagaggctatctgaaaggctttttctttattatcgaatcgttacctgatattttcgttattcttcttgctcagataggagtgatctggatttataaacagacagaccttctgctatttaacctaacgagtggttttgacgaaaaagcaatcgttttgccaattcttatcctttcattgcttccttccgtttacatttataagtatttgttgctctcttttgaagaagaagaaagtcagctttatgtagaacttgcgagagggaagggattagatcggtataccattttacttgttcatatgtttcgtaatgctatggtctcgctatttaaccattttaaaggagtatttctatttgcccttgcaaacttgcttatgcttgaaattatttttgacatgaacggtctaatgatgttcatttacaaaaatggtgtcgtaaatacagaaattgtgacgcttgccctgtatatgatctttctaccagcctttattctctttactactttcgagtggctgattgaacgatggatggcaagacaggagggagcacaatgaataaagcgtcacttttgcgaagtggtccgtttgtaatcggtgttatctttctcttatgtcttttagtaagtagctacgtgtataacttttacgattcgtatgttcaaccagagaaaatgctttacgataaaagtggaaatgtcgtggctttagccccgttttctccttcactgcgctttccacttggaagtgatctcgacggtcattcatttgtgttcaaactgataaaaggtgctaaatacacaattggtttttccttaatcattgctttttgtagaatgatcttttcttttggatttggctatctgctttatcgcatgccactttctttaagaacgttatttagtgggctttccaatgcgctccactatgctccagttacgatttttacatatatcctcatcgcacctgtcgttttaacgtttagctggagctatgatgtcaccacgaagatcatttttccgatgcttattttaattgcgatcagcatccctgttttagctctgtacatacaaaatgagttagatgccctatctaaaaaagaatacatagatagtgcaaaaataatgggaggaagccactctcatattttcagaaaacatctggccccttttttgtacccaaagcttctcatcctatttgtacaacaggtaggacaggtgctcattatattcgcacatcttggtttgttaaacgtttttattggtggaactgatgtaagagtggtcgattatgatatgaaaacaggggaggagacaactcaatcattctccatgtcgaatgaatgggccggattaattgcacaaaattttccttatgcacagtcatttccatggatggttcttgcaccggtcattgcttttgccctatcgattctggccattaatagcatcgtatatggattaacgaatcgcaaaatctttcgaaaacgagaggtgaaatcaagcacatctccgtcaaacatgatccttcgtcaagaccattttgaatttaagcaaacgaggacttcttctaagtaaggataacactatcctatacgatcacttgtacgctatactaatagctagcgtattttttagagagagggatgttacgattggccgtttgtattatcgccgaaaagccagatcagggaacgcgccttgcagcgccttacccaactgaaaaaaaacaaggatatttgtacataaaaccaaatccggactttcctgacggagcttatatgacatgggcggtgggacacttatgtgaacttgttccgcctgaaacctatgaatcttcatggaagaagtggtctcttcaaacacttcctatgattccaaaccaatttcaatatcaggtaacgaaaggaaagtggaagcagtttaacgtgattaaagaactagtcaataaaaaagaagttggctcaattatccatgctggagatgctgggagagaaggtgagctgatcgttcggacgattttgaatcaggctcgttgtaaaaagccgatgaagcgactttggatttcttccttaactgagcgtgctgtaaaggaaggatttcaatctctgttagaagaagaagagactcgtaatctttactatgaggcttatgccagatcgtgtgcagattgggttgttggcattaatgcttcacgtgtctatacgcttctttttaaacagaaaggtgttcaggatgtgttttctgcagggagagttcaaacgcctacacttgcgttagttgtgcaaagagagaaagaaatcgcggactttaaatcagagccattctgggaagtgaagggggagtttgactacaatggaaaaatcgttgttggaaaatggattaaagacgagcaaacgaggttgcaatctcccgaaatggcgcaggctgtcgctcaattttgtaaccaaaaagactgcgtagcaagtgaagtaaagaaagaacgaaagcaatacaagcctccctttttgtatcaactttcttctcttcaatccactgcgaacaaacggtacaaattttcgccaaaaaaaacgttggacattgcgcaaaagctttatacgaaagggaatatttcctatccacgaagtgattctagctttgttacgaaggatgaagcggctgaatttccttccattttatcaaagctacaaaaacaaagtgcttatcaagattattttccattaaaacgggagacgatcttaaatgacaagaggtttgtcaatgcatcaaaagtaagcgaccactatgcgatcatcccaacagagcaggttccaaaccttgataaactgtcaggggatgaggcaaagatttatgatttaattgcaagaagtttacttgcggcgcatgaagaggcctcaatcgttgattatacgactttattcacgcttgtcgatcaacgagctttgttccaatcaaaagggcaggtgcgcgtacaagaaggttggcagcggatcataccatcgactcaaaaagatgaggaactacctgctattgagcagaacgagcaaggtaaggtgctctcagcggaagtaacagagggtaaaacccagccgccaaaacgatttactgaaggtcagctgattacaatgatgaaaacggctggaaagcatcttgacgatgagtcattagagaaaatcctgaaagatacggaagggctaggaacagaagcaacgagggcaggcattattacgatgctgaaagatcggaaatacattgaagttgttaagaaccaagtattcgcaacagataagggaattcttttaatcgactccattggggacgcggttctttcaagtccagaaatgacggcgaagtgggagcagcggctcaaacaaataggtagcggtgaagcatcaccacaaacctttatggaatctgttaagaagcttgcagcgaaactaacatcagatgcgattgaatcttcagctgcctgggatttaaaagatataaaaatagaagcccaaccttccaaaaaatcattagggaaaaaggtaggtacatgcccgctctgtggctctgatgtactagataaggggaagttatttgggtgtagtagctattctaaaacaaactgttcgttcacgatttctaagcgaattctggggaaacctatttcacaaacgaacgcaaagaaaattcttaaggacggaaaatcaaatgtaattaaaggattaaaaagtaaaaaaggcacatttgatgcagcgctcgtttggagtgcagaagaaaagaaactaacatttgaatttgaaaagaagtgatttgaagcatgcctctcctaaaggcatgctttttctatttggggatttatttagggtaggtctaaaaaataattaaaaaacttgttgtatatatattctttaatatgtataatcattcaataagaacagtaagagggagtggaagcagtgaaagcaagtattgtcggtgctagcggatatagcggactagaattaattcgcttattgcttagtcaccctgaagtagaaattaatacaatcgtttctccaactaacgcaggaattaatgtacacgaagttttcccacatctcacgaatatacaagtaagtcaatttgaagcacttgaggcagaagagcttgcttgcgaatcagatgttattttcttcgcaacaccagctggcattagcagtcagtcaattccaaagcttctcgagaaaagtgttcctatgatcgatctatccggggacttccgattaaggaatggagatgtatacgagaaatggtataaccattcatctccacctgatgaagcacttactaaggcggtatatggattatcggaatactactcagaagatattacaacggccgacttaattgccaatccggggtgctatcctacagcgacgttacttggtattcttccggtcatcgaatcaggatgggcgaacccaaattcattaatcattgacggtaaatcaggtttgtcaggagcgggacgtaaaacgagtcttacagcacattactctgaggttaatgagaatgtatcagcatacaaacttggaaaacatcagcatattccagaaatagaacaaattatttctaataaaatcggtgaagatgtaactgtttcgttttctactcatctcgtcccgcttacaagaggaatgatgtgtagtatgtatgtcaatttaaatcaggacttatccgaaacagaagtgattgatctttatcaatcaacatatgagaatcatccttttattcgagttatgcctgaagggaaatggcctacaacaaaaggtgtttccggttctaactactgtgatattggcctttctattgatccgagaacgaaacggttaacagtcatctcggtgattgacaatttgatgaaaggtgctgccgggcaagcggttcaaaatatgaatctacgatttggttaccctgaaacagcaggtcttagtttatcaccagtatttccataaaactagcaaatgaaagggttgaatactttggcaacatcgacaataagtgaggaacttttttcgattgtaaacgatggcacagttacttctcctaaaggttatgaagcaggtggatttcatgcaggtttaaaacgaaagcgtaaggatcttggctggataaagtccgttgtcccagcgaatgctgcaggggtatttacaatgaatacttttcaggcaccgccattaaaggtgacaaaagaaagtttaaaaggtggaaagcttcaaggtctcattgtgaattcggggaacgctaatgcttttacaggtgaaaaagggcttgaagatgcctatgaaatgcgtaaacagtttgcatctgttatgggactgactgaaatgcaaacagcagtgacttcaactggagtgatcggagagtatttgccgatggaagccatcattcaggggattcatcagatcccacaatatgcgccaaaaacaagcggagctgactttgctgaagcgatcgtcacgacggatacgatgacaaaggaagtggcagttacatgtaagattgatggtaaggagataacgattggaggcgctgcaaaaggctccggtatgattaagccgaatatggctacgatgctagcctttgtaacaactgatgccaaagtagagaatgacgctcttcagtcagcattaagctctgttactaacacgacctacaacatgataaccgtcgacggtgaaacgagtacaaacgatatggttcttctgctcgcaaacgggcaggctgacaatgaagagttatcggaaagccaccctgagtggcaaacgttcttaagttcacttgagtatgtttgtcagcagttagctaaattaatcgcaaaagatggcgaaggggctactaaactcgtagaagttcacgtaatgggggctaaatcagaagacggcgcaaaagcaatcgcaaaatctgttgttgggtcaagtcttgttaaaacagcgatttacggaaccgatgcaaactggggaaggatcgtttgtgcgatcgggtacagtggtgaatctgttcaagaagattctctttccatctcactgggacccattaaagtagtggattatgggatcaccacagaatttaatgaggaagaggcaaaaacttatttagaaaatgagaacattcatatctatattgatttgcataaaggaaacgaatcagcaacagcatgggggtgtgacctttcttatgattatgtcagaatcaatgcctcctacagaacataaaaacatgtattttgtcattaaatgtggaggaagtatattaaatcagcttccagatgcattctaccatgaccttgttgcgataaaaaaacaaggttatcatccggtacttgttcatggtggaggccctgagatctcaggattgcttgataagctatcgattcacacatcgtttgtcgatggcttacgagtaacaacagatgagatggttgatactgttgaaatggtactaagcggtaaagtgaataagcagcttgtaaggaaaatttttcgcgctggtgctaaagcaatcggcatcagcggagttgacggaaaaatgtttacatgtaaaccgttaaacaaagcacttggccgtgtaggagaagtaacttcagttgatcgaacgattattgatcagctttcattcgctggatacatacccgtaatctcaccaataagtatggatgaagatggtgggtctcttaacattaatggggatgaagctgcttcggccgttgctcaggtgttgcatgcagacatttgtctagtaagtaatacgccaggtgtttatgaagaaatcgatgggcaaaaaaacatttacagcacgcttgatgaactaaaaattacaagtttgatagaagaaggcacgattagtggtggaatgattccaaaagtaaaaggagcacttgcagctctctcagatgaagtatcctccgtcatcattcttgatggtcgagaaaaaaatgccctcttaaaagcagtaaaccatgaacaaattggcacacgtatcgttcgaaaggagcttcgagaatgtcactaactaaaacgtcacaaacaagcattatgaaaacctacaatcgacttccgatcactgcggtaaagggtgcaggaagcttcttatatgatgaaaacggaacaaaatatcttgacttcacttcaggaatcgcgacttgtaatctcggtcaccagccggaagtggttaaaaaaggtttaacagagcagcttgatctactctggcattgttctaatctgtaccatattccaaaacaggaagagcttgctaacttacttgtaggaaaaagttgttttgaccaggctttcttctgtaatagcggtacggaagcgaatgaagctgcgattaagctcgttagaaaatggagcggtaaagacaccatagcaacgtttacgaagtctttccatggacgaacgcttggttccctttctgctacagcacaaccaaaccttcaagatggttttggctctatgcttcctggttttgaatatttttcttacaacgattttagtagtttatcagaaatcgaggaactaaaaccagcagccgtcatgttagaactcgttcaaggcgaaggtggcgttcgaccagcagatcagaagtgggtttctgaacttgtatcgatttgccattctaacgatattctcattgtagttgatgaagtacaaaccgggatggggagaactggcacattatttgcacatgagcaatatggatttgagcctgatattatgactctagcaaaagggttaggttcagggttcccaattggagcgatgctagcgaaagaaagcgttgcgacaacatttggcccagggactcatggtagtacgtttggaggaaatccacttgcatctgctgctgcgactgaaactgtaaaagagatcatctccttactgaaccatgcaaaagagatgggagagtttatggtaaatacaattcacaatttatctgagaagtacaaatccattatagaagtgaggggtctcggattacttctaggaattgaggtgaaggatgccgcaccatttgttaatcagctgagggaaaaagacgttcttgttttaagcgcaggacctacggtcattcgcatactcccacctctcaatgtgagtaagaaggaaacagaggaattcttgaagaaattaacagaggtttttaaggcagcagacgaggaggatcaatcatgaaaaaaggctatcttgtattagaaaacggagcagtatttgaaggcgatctaataggggcgattgaagcttctggtgaagttgttttcaatacaagtatgacgggttatcaagaaattgtaacggatccttcctatgcaggacaaatcatcgttttttgttacccacagattggtaactacggaataaacaaacttgatagtgaaagtgaccagcttcatcttcatggggtgattaccggtgaacaatgtgaggcaccgagtcattatttagcaacgggttccttttcaagtagccttttgcaaaatcaaattccttctttaacaggtgtagacacaagggctcttgttaaaatgctacgtgatcatggcacaatgagagggaaaataatggctgaacttagtgaggacaatgatgaatggctatcagagcagtcttttgttccaaatgtttcagtaaaagaaaaaacatattatgcaggtgatgggccacacattattctcatggattatggctataagaagtcaattctcacgtcccttcaatctcttgggtgtgccgtaacggtcgtaccgtttcatacatcatatgagcagcttgttgccctccaaccagacggcgtggtgttaagtaatggtcctggagatcctgaagctttatcctcatgcttcgaaaccattcgactaattagtgaaacttatccagtattcgggatttgtctcggtcatcagcttctagcccttgcacatggagcctcaacacgaaagctgacatttggccatcgaggatcgaatcacccggttaaacatttggagacgggtaaagtgtttatcacctcacaaaaccatggatatgaagttgtagaagatagcttagaaaaaacggggtttgcgctaacttttgttaatttaaatgatggaacggttgaaggattaaaacatcagcattacaatatccaatccgtacagttccatcctgaagcacacgcaggaccttcagatacagcctttttattcgatgcatttttgaaacagataacaagaacaggagaccagcactatgcctttacgtaaagagttaaataaagttgtgattttaggatctggccctattgtcattggtcaggcagcagaatttgattatgcaggcactcaggcgtgtcttgctctgaaagaagaaggaattgaggttgttcttattaatagcaatccagcgaccatcatgacggattcttcggtagcagatcatgtctatatggaaccgatgacgcttccatacgtcgaagaaattctcaaaaaagaaaaaccggatggaatcattggaacgctaggaggacaaacaggattaaatctcgtggtccaactttatgagaaaggaatcctagagaaattaaatgtagcgcttcttggcacgtcagttgaatcaatacaaaacggagaagaccgagagaaatttcgacagcttatgcttgatatcggcgaaccagttcctgaatcgaaaatagctgtaacgagtgaagaggcacttgcatttgcgcaagaaattggctacccaattatggttcgtccagcttatacgatgggaggcgaaggtggaggttttgctgcagatgacgtcgctttgcttgaaatcgtcgatcgtggtctttcattaagtccaatccatcaggttttgattgagaaaagcatgctaggttggaaagaaatcgaatatgaagtaatgcgggatgacaatgatacgtgcatgatcgtatgtaacatggaaaacatggatcctgttggaatccatacgggagattccattgtagtggcgccttcgcagacgttgaatgattatcagtatcagatgcttcgaaacgtttcattaaaagtgattcgtgccttgaatgtaatcgggggttgcaacattcaaattggtttaaatcctgaatcaaacgattattacattattgaagtgaatccgcgtgtaagccgatcttccgcactagcttcgaaagcaacggggtatccaattgctcgtatggcagcaaaatgtgcgatcgggtatacgctagacgaactcccaaatccaataacaggtacaacttatgcagcgtttgaacctgcacttgactatcttgtcgttaaaataccgaggtttccatttgataaatttcctgaaggtgatcgcgtactgggcacgcaaatgaaagcaacaggagaagtgatggcgattgatcgtagttttgagggagcattaaataaagccattcgctccttagagagtgggcatcattcattgactagtagtctttatcagaaaattagtcagaagtatttaaatgaacagctaaagactcctacggatgaaagactttttttcattagcgaagcttttagaagaggatactctgttgcagccgtgaaagaatttacagcaattgatagctggttccttcacaaagtaaaccgcattgttcaagcggaaatgaagactttaaatcaaaaagtacttacgaaagaatggttgcttgaattgaagcagcttaacgtaagtgatgcgtttattgcagacgcaactgaaataacgattgatgaagttatagcgatgtctaaaaaggcaaacatcaacagaggcatgaagcaagtcgatacgtgtgccggagaattcgaagcgattacgccttacttttattcaacctatttaggaaacgatgaagtggaataccacaatgacccagccatcctcgtacttggttcagggccgatccgaatcggccaaggcgttgagtttgactattgctcggttcacgcagcagaagcggttaaaaagttagggtatcgagcagttgttatgaataataacccggaaaccgtcagtacggactatagcgtggcagatcgtctctattttgagccactttcgctcgaagacgttctcggagttattgagaaagaacatattgttggtgtggctgttcaatttggtgggcaaactgctgttaatttagcggaagagttgaatgagcgaggtgttcctattttgggtacaccagttcaaaatattaataaggtggaagatcgtcatcagttttataatctgttggactctctttcaatcccttatattgaagggaaaatggcttatcagccagaagaaatggaacagcttgcagcagagttaggtttcccaatcattgttagaccttcttatgtcattggcggacaaaacatgtttattttccgtcatatggatgagctgaaacgctactcacaaaaattagagaacagttcaactaaaatgtggccgtttcttctcgatcgctttgtcgaagggattgaatgtgaagttgatgtcatttgtgacggagaatcaatcgccattccaggcattatggagcaccttgaacgagcgggcgttcattctggagatagcacagcgatttatcctcctatttccattacagaagagcagaaagaaacgataacgatgtattctgaaaagttatcacatgcgctcgaatgtcgtggactaatgaatatccaatttgttatagagcaagatgtgatttatgtgctggaaatcaatccaagatcgtcaagaaccgttcctgtcattagtaaggtgacgaacgttccaatgattgaatgggctatcaaagcacaattacaaccaggctcattagaagtaactggattgttagaagaaaaaccttattataccgtaaagtttccaattttctctaaaggaaagttaaaaaacgtcgatcatgttcttggacctgagatgaagtcaacaggagaagttttagctatttcaaaaacaaaagatgaagctttacgtaaggcatctttatcaacatggaatccaaataaacagccttcttccatactttgttcgattagtgaggagcataaggaagctgcctttaatgtcttgatgaagcttaagcaaaaagatattactttctacgctacaccggggacggcagaattcttaaacgaaaaaggaattcaatcgattgtcattcagaaagatttgcatgaagtagaggcgttgatgaaagaagagctaagtgctgttatatcgattccgacgatcggtagagaaaaagaccgttctggcttccagatgagagcactcgcgactcggtataaagttccttgttttacccacgtcgacacgcttcagcttttggatttagaaacttcaaaaacgcttgaagtgaacagtctccaacattggcaccaaatgaaacatatttcaatcggacaggaaggatgatttaatcatgcaaaccgtacaatctcaaaccatcgctgaaggaatgaaaggaaaagactttcttacgattgatgagttaacatctgaagaaatccatcatttattagatgaagctgcacagttaaagaagctacaaaaacaaggggtacctcatgaagagttgaaaggtaaagtgcttggaatgatctttgaaaagtcttccacaagaacgcgtatatcttttgaagtcgcgatgcttcagcttggaggtcatgccttgtttctaagttcaaaggatatccagttgggaagaggagaaacaattgaggatactgcgaacgtactagcagggtatcttgacggagtcatgattcgtacttttggtcatgagaccattgaacgttttgcttcggcttcttcagtgccagttattaatggattaacagattctcatcatccagctcaaatccttgctgatttactcactattatggagcataaagggcaattaagtggactgaaagcagcctatttcggggatggaaacaatgtggctcattctcttattgaaggagctgcgaaagtcggtatgcattttacaattgcctgtccacctgactatgaaccagatgaggccatcgtagcgaaagcgaaagaggtggcaaaggaaacaggagctattatccaaataactgatgatccaaaggcggctgcatcgaatgcggatgtgttgatcacagacgtttgggctagtatgggtcaggaagaagagcaagctgagcgtgaaggcgtgtttgcaccttatcaggttaatgaggagttatgcataaatgcagacgaaaattacatctttatgcactgcttgccagctcacagaggagaagaggttacggcagagataatcgacgggccgcattcggttatataccaggaagcagagaatcgtctacacgctcaaaaggcacttttaaaacttttattaaaaagttaaatttttttcgtgcattttgaataaatatacgttatcatagatattaatacaaagataaggagtggatgacatggcaaaagagaaaatcattcttgcttattccggaggtctcgatacctccatatcgataaaatggttagaagaaaaatatgggtatgaggttattgcgcttggccttgatgtaggagaagggaaggatctagaatccattagagaaaaagcgttaaatgtaggtgcatcaaaagcatatatgatcgaagcgaaggaacttcttgctgagaactatcttttacccgcattaaaagctaatgcattatatgaaggaaaatatccgctttcctcagcgctgtcacgtcccctcatttcaaagcttctcgttgaagctgctgaacgtgaaggggcgacggcagtggcacacggatgtacagggaaaggaaatgatcaggttcgctttgaagtatcgattcaagcgttgaatccggacttgaaagtgatcgcgcctgttcgtgaatggggaatgacgcgtgatgaacagattgcttacgcgcaagaaaaaggaatcccagttccagttaaacttgataacccattttcaattgatgccaacatttggggacgtgcatgtgaagctggtgttcttgaagatccgtgggctgaggcacctgaagccgcatacgattggacagcaccaattcacttaacacccgatgagccggaatacattgaaattgattttgaagaaggctgtccaacagcactcaatggccaaaaaatggggctagttgatcttattgagaagttaaatgaaatcggcggtgttcacggtattggacgtatcgaccatatcgaaaaccgtcttgttggaattaaatctagagaagtatacgaaaatccaggcgcactcattttgattaatgcccataaagaattagaatttttaactcatacgcgtgaagtatcacagtttaaaacgacgattgatcagcagctgtcaaaactaatctatgatggactctggtactcaccacttcgtcaggcgcttgaaggattcattaacgaaacgcagaaagtagtaagtggtaagattcgtcttaaattacacaaagggtcaaacacagtggttggccgtaaatcagagaattctctctataacgagcagcttgccacatatcttaaaggcgatcttttcgatcatgatgcagcagttggctttattaaactttggggcttgccaacgaaagtaaatgcagaggtgcataagaaacaaaaagtaactcaataaggagatgttagtgtgtctaagctatggggtggacgctttacaaaagaaacgaataagctcgtagaagaatatacagcttcgatccagtacgataaagaactagcagaagaagatattgaaggcagtctggcccatgttcagatgcttagtgaatgcggtgtgatcagtaatgcggatatgaaagaaatcaagcgtggcttacaggtcgttctaaataacatccaatcaggaaccttccaatatgatgtttctcaagaagacattcatatgaacattgaaaaagcacttattgatgagattggacctgtcggtggaaagttgcacactggaagaagccgtaatgaccaggttgcaacggatatgcatatgtatttaatgaaaaaggttaacctttttatttctcatatcgaagaggttcagcaggcgattttaagccaggctgaatctcatgttgaaacagttttaccaggatatacgcatttacagcgggctcaaccggtatcatttgcgcatcacatgctcgcgtatttctggatgtttgaacgtgataaagaaagatttcaagacagcttaaagagaacaagtatgttaccgcttggtgcaggcgcattagctggaacaacttttccgattgatcgtcatcgtacggcagaactattagggtttgacgaggtttatccgaatagtatggacgctgttagtgaccgtgattttattgtcgagtttctttcaaatgcttccatgcttatgatgcacatgtcacgtttgtcggaagaattggtgatctggagcagtcaggaatttcaatttatcgaactagatgactctttctgtacaggatcaagtattatacctcagaaaaagaatccggatgtacctgaacttcttcgagcgaaaaccggtagagtgtatgggaatttgtttagcttgttaactgtattgaagggactgccccttgcttataacaaagacatgcaggaagataaggaaggcatgtttgatacagctaaaacccttgatggtgctcttcaacttttagctcctatgattgaaacgatgagtgttaaaacagaaaacatgaagcaagctgtaaatgaagattattctaatgcaacggatattgcggactaccttgttaataaaggtatgactttccgtgagtcacatgaggtaatagggaaaattgtcctttatggaatccagagaaagaaatttttacttgatcttacaatggaagaatttaaatcattcacgccgttgtttgaagaagatgtatttgatgtattaaaacctgctaatgtgatgaatgcaagaaaaagttatggaggaacgtcgccagagcaaatcgcgattcagattaaattagctcatcggcaggtgaaagaaaacgcataaagggccctatccgataggataagaccctcatgaagaaggaagttattagcgtttgctaaacaagcgatggggtagaacggtagttgtcttttggagacacctctttctaatgaaagttgttagagccttgttttaccaacagagtagttcaacgcgaccatctccttaaaagcttccgttttccttatgcacttttgttcttccctcttcactagttatgatagccactttcatcttgttctatacatgcccattcaaatttttttcggatactttttttctgtaagtgggagaataggaagagatgaaaggagggatttgatgggccgagggaaagcatttgatcataagaaaaaagggatggaacgcgaaagaccaaaaacagcagatcgcacaaaattcccttatgaagcttcaacaggacataaaacaattcgtaatgaagaacgcgaagaataaaccgagcttcctgcacatgcagggagctttttgtttttacgaagcttgctttcttgagcttcatttccaattccagtaaacttagtggtagatgattaaaaaggggattttaatatggattcagtaggccttgtattagaaggcggaggtatgagaggggtatacacagctggtgttttagagtacatgatggagaataatttatactttccgtacgttattggcgtatcagctggagcgtgtaatgctgcgtcgtatctttcaaggcaaagtggaaggaaccgtacagttcttattgattacgtcaatcatccggagtacatctcatacaaaaatttagttcggaaaaagcaactttttgggatggacttgatttttgatgaaattccttcaacacatgtaccctttgactttgatacatttcagaatgctacggaacaatttgtgattgggacaaccgatatttttacaggaaaaccttattattttaataagaaagatgatggtgaacaaatacttcccattttaagagcatcaagctctttgccgtttatggctcctcccgttcaaattaacaatcgttttcaccttgatggaggcattacagatccaatacctgtgcataaatcagaagcagatggtaatcacagtcatgtcgttattttgacacgtaatgaaggatatcgaaaacaaaaatctaagctctcctggatgattcaacgtctttatcggaaaaatccagcactcgctttagccattacttctagatacaaacattacaaccaaacgcttgagcacattgaagccaatcgcgaaaattattttattattcaaccgtctacgccactggaagtagcgagaattgaaaaatctcaaatgcggttaacatcgttatataatcaaggatatgctgatatgaaaaagcgtcataaagaacttgaaaattggttagaaaagcgagctttagtaaaagaaactgtttgaatatgtgatcatatgtttaaagcgatagctatttagggaacagtccttcaacactatgtaggaggtcattcaagtgaaaagctatcaaatttatattaatggtgaatttacaaatagtcattctgaagaaatgctagacgttatcaacccagctacagaacaagtgatttcacgtattccgaaaagtgatgagaatgacgtgcagcgtgctattgaagcagctaaagcttcccaaagagagtgggaaaagaaaccttcaatcgaacgagcagagtacttatacaaaattgcagataaaatagaagagaaaaaagaagcgtttattaacatgttgactgaggaaaatggcaaaacagttgacgcatcaaaggcagaagtggaattaacgattgactacttccgctacatggcaggttgggcaagaagatacgaaggagaagtactcccaagtgatcgcccaaatgaaaatatccttgtcatgaaaaaaccaattggaatcgttgggggaattgttccgtggaacttcccaatgtttatctttgctcgaaaagtagcgccagcatttgtaacaggttgtccgatcattattaaaccaagtcaatatacaccgaatacagcatgtgagctagcaagcattatccatgatgttggtgttccaaatggggtattcagtttagtcactggtaaaggctcagacattggcacgccacttgcttcttcaccagacgtacagatgattagtttaacaggaagctacccagcaggttcaaaagtgatggaagcagcagctaaaaacattactaaagtgaacttggagctaggtggtaaagcgccggcaatcgtgacgaaacatgctaacgttgatcttgctgttgaaaagattacgacgtctcgtattacgaacaacggtcaggcttgtacgaacgcagagcgtgtttatgttcatgaagacgtagctgaagaattcatttcaaagataacagaaacgtttaagaatacaaaagttggagattcattaaacgaagatggatgtgacattggtccactagcgaataaacagcaaatcgactctgttgaagaaatggtaaacaatgccgtaaaagccggtgcagttgtaaaaacaggcgggaagcgtgtagaccgagataaaggctttttctttgaaccaactgttttgacagatgtttcacaggatatgaatgtcatccaagaagaaattttcggacctgtgttaccaattgttgtttatagtgattttgataaagtgcttgaaatggctaacgacacttattacggtctttcttcatcaatctttagtgataacatgcatgaagtcatgaaagcttctaatgttcttcgctatggtgaaacgtatgtgaaccgcgagaactttgaagccgtacaaggtttccacgctggaatgggccaatcaggtattggcggtgcagatggaaaacatggtcttaatgaatatcttaaaactcacgtgatttacatggaatatgatcaagatattaaataataaaaaccgggcatatgcccggttttctaatgtttgaagaaagttgaatgtagggcgtataataggaaggcagaacaatattaatttgaagaaaagagggagaatatgtttgattctcgtattatagagtttgctgagaaattagtacaatactcaaccaaggttcagcaaggtgaacatgtgttaatcgaagcatttgatgtagacaatactctcgtacgcagcattgtgaaagaggtacataaagcgggtggttttcctcatgtaaacttgagagataatcaggttctacgggaactgttgatgaatgcgacagaagaacaaatcacggagtgggctgagattgatttaaatcaaatgaagaaaatggatgcttatattggaatacgtggctctgagaacattaatgagctttcggacgtaccagaagcgaaaatggcgttatataatcaaatttacaaaacaaaggttcacagtaatcaacgtgtgaagcatacaaaatgggttgttatgagatatccaaatgaatccatggcacagctatctggcatgagtactgaagcatttgaggacttttatttcaatgtttgcacgatggattatgcaaagatgagtgaagccatggattcacttgtggatcgtatgaacaaagccgatgaggtacgaattgtttctcctgatacaaatctaagtttctctattaaagatattccggctgtaaaatgtgctggcgaacttaatatacctgatggggaagtttttactgcaccagttaaggaaagtgtaaatggtgtcattacgtataatacaccttctccttacaatggttttgtatttgagaatgttcagcttacgtttgagaacgggaaagtgattgatgctgaagcaaatgatacagagaggctaaaccaaattctcgataccgatgaaggagctcggtatatcggggaattcgcgattggtgtcaatccgtttattcgtgagccgatgaaagatattctatttgatgaaaaaatagatggttctttccatttcaccccaggacaagcatatgatgaagcgccaaatggcaatgattcttctgttcactgggatcttgtcttaatacagcgccctgaatatggtggcggcgaaatttggtttgatgacgagttaattcgtaaagatggcaagtttgtcccagaagcacttcaagttttaaatccagacaatcttaaataaagaagaggaacgcatccaatggatgcgttttttcgtacagatgaccaatcacattttcatccttttgaatataaataaagaaaactactttaagacaggaagtgccttccaatggaaatacattgtgatggatgtacgaaggagatgagagactgggaaaccattcatatggtgaagttcgataaatggtatgttggtcatttcaactgcttattgaacttgaaaaaaaaattgaatctcaatagaccgattaagtgggataaactagaaggtaagaaagataatcagaagggctcggatgggaaaacagcaaattagatcgagggcaagaaaagacgctaattttagttagcgtcttttcttgtgaaatgtatatgagacgtctctttattcgtcgctttctttcatataggttattgcttgatctgcatgaatcgcaaaagtgagcggcgttttttttatgtagccagcttttttaagttcgctaaccgtggcgctcactgtttctcttgttgaaccgatcatcgtggcaatatcataatgtgttaacttaatgtcaatggtttgccattcattctttctttttccgaatttttcacttagtttcaacagaagagaaaggattcgatattttacgcttcttaacgcaaggttttcgctcatttcatagatttctttcagccgagctgagaggatttcaataaatttgatagcgagtttagggttttcggatataagttcttcaaattgatctttccctatgacgcaaatgtagacgtcagacattgcctctgcgtatacagagtcatcgcttagcgagaaacttgatgtttcgccaaaaacatttccgtctcccaagaggtcaactgttagttgtttacctgctgcatttgagcgataaagtcgaacggtgccttttttaagaagaaatagagctttcatgggtttttcaggaccaagtatcaccgtccctttttttaaaggctgcatgtcactaacgcgatcgatttgcattaaatcgttcatttccaattcttcaaataagttgatttgagataacattgttaatttattgattttcttcacctgcattcatttaattgttgctatgttctgtaagttagcttacagcatcttacttattttatcacttatacttagtggtgttaggaggttaaaggtctaacatggaacagattaaattatacacgattacaagctgtatggaatgtctcaagaccaaacaacaattagggttaaaaaatgttccgtttgaagaagtgaacatcttggaacaaccagagcgactggaagagctgatcaggctcgctggtgaactttatgtccctttttagtagaaggggatcggtctatttctctagagaatttataaattgaacgccagtcaccggaggaggatgaggtgaatattgtagaggatctaataaatgaggtgatacaatgttagcttgtcatcctgcaataggttacacagcaatcggtgactctattacattaggaacagggaccttattgttttctccaacctttgtagatttttataaaaatgatatacaatgttccctaagaaaaacggtgaacctgcgtgtttttgctgaaaatggagcgacaacgtcggaagtgaaaaaatggctatcttgctcgaagatcgacctggaacaaacgcacatcgttacattaacagctggtggaaatgaccttatcgatgcggctgaatcttatgcaataacgaaaaatgatgatgtgttggaagatgctttgcatgtttgctgtcaaaatatgagttggattgtatcctatttatctaatgctataaaccagtcagatgcaaaagcgatgatacgaattgtcaacttgtataaccccattcctactattcctttttcggattactgggtaaagcagttcaaccgtcatattgacaaatgttccactggagagttggtgagagtggctaacgtatttcccgtttttaaagggagagaaaagcaattgttagcttcagattgtatccatccgaacacgcatgggcataaagaaatttcaaatgtacttatgaaaacaggaatatgtctataaatgtttaatttatttgaagcaagggtaattttttgtgttaatacattatagaaatactggggaggaacatatggtacaacaatcgattcagttaagcgaattacgagaacaattgcttcattcctttgaggcgacacgtgcaatgacaaatacattagtggaaccgcttgagacggaggatttcaccatccaatcaattcccgatgtaagtcctcccaaatggcatatggctcacacaacttggttttttgagacgtttattttaaaagagtataaagaacattatgagtcttttcataaagaatttgactatttatttaactcgtactatgaaagtgttggaagttactttccacgacattcaaggggattattaagtagaccaagtatcgataaagtaagaagctatcgttcggatatcgatgaagaaatggtgaacttaattcaacaaatcgatgaaggagatcttcaacaagttgcagatctcgttgaaattggactaaatcatgaacagcagcatcaagaacttttaatgacagatattaaatataacttctccgttaatccgttgtaccctgtataccgtccacttgatggcgaacctaaagcaaaagcgacaccgctagagtgggtgtcattcgaaggtggacttattgaagcgggtatggatgaagacgacggcttttcttttgacaatgagcgtccagtacataaggtatggcttgaaccatttaagttagcgacgagaactgtgacgaatggagaatatatggaatttatcaatgctggaggctatgaagaggctacctactggttgtctgacggttgggcaactgtgaagaaagaaaattggaaagcgccattgcattggatcgaaaaagatgatgagtggtatgcgtttacacttcatggactagtgccggttaataaagaagagcccgttacccacattagctattacgaagccgaagcatatgcgagttttgtagggaagcgcctaccttcagaatcagaatgggaagttgcggtgagggatcagccgatcgctggtaattttgtagaggatggtcactatcatccggttgcatcagtgaaagaagaagaaggtaaccttaaaaaagcttatggagatgtatgggaatggacgaaaagtccatatatgccatatccaggtaacaaacctcttgacggagcattaggtgaatataatgccaaatttatgagtagccaaatgattttacgaggagggtcatgcgtcacttcacaatctcatatccgtccgacatatcgtaatttctttggtccagataaacgctggcaatttacaggtattcgccttgcagaggacgtggaataacaggggattttagcctaatttactgagttattggatatgacagccttcgaccacattaggctataacttcttaatgctcaaatatcgtaatcttccttacagacattagaagattatttcgatataattgtcactgaagataaagatagaaggagcgatgattgtgaaaaaaattgaaacggctgaatcttatcagtcctttattaacgataaaaaggtatccattctaaaatacgaagccaactggtgccctgattgcaaacgtcttgatttttttattgatgatattattaatgttaatcaagataaatcgtgggctcaaattgacattgaacagtttcctgaaatcacagaggaaaatgacgtaatgggcattcctagcttacttgtttataaagacgggaagaaaattggtcacttgcatagtgcaaatactaaaaatcctgatcaagtgaaagaatatctaagtcagttttaataatgagagaaggttgcacttgcaaccttctctcattttgtaagtacatattcaactgtgccatcgttaagtgaatgaacgtaagcaattgagtagccgatgctaagataaatcgatagtgtttcggtacatgaaggatggaggggctcagttggcgcgtgaagacttttgtggagtgcagttgtttgattggaaaatggtgaacagtgaagaagtacaacatgttttccaatccaagcagtcccgatttgatgtcgtctcatgacactcttcctttaccgtatttttagttctcttccatcacctgcaaaaatgagaagctattcggtttagacggaaagattcactttggtgataggagtatgatatgattcatgcaagttgaatgatatgaatacaacattattttaaaaatattttgaattttttctccgtagctggtatattagtagcatataccggcaaacttctattgaaaatttgtaaattctttgaaaacatgtaggatttctaggaaaatagtcggtgcatgtcatttcttaattctccagataagggcaaaccattctaaagaatgggacgcaaagacacaggtctaatgttgggttaccaacgatgacggctggtcctcctggaaacccgataaggaggagaaaagaatgaccatggcagagattaagcctaaaaaagtacttgatcaagaatgggttattctaatgagggctgcccgggagcttggattacaaaaggaagaggtaaggtcattcctaagacaagacaaaaaaccgacatctacgaatgtacataaatgataagcgaccagtaaggtcgtttttttctggcttaatccttgactttaggtgaacattttttgtatcatatgtcatatcaatctcatacataaaccatactaactatgaaggacaaatagtaatcagataaacctcatttaagcgattcggggatggtgcgagcccgaataaggtctgatgaaacggcggtctggagtttacgttctgaaagtggatgcatgaaatgcatcaactagggtggaaccgcgggtgcataagctctcgtccctggacatttattgtccatggagcgggagctttttatattgattgaaaaaaggagagaataacatgacaatttcaatggatcagatcgtatctgtatcaaagcacagaggatttatttttccggggtctgatatttacggaggactcgcaaatacgtgggactatggtccacttggcgtagaattaaaaaacaatattaaaggagcatggtggaagaaatttgttcaagaatcaccatacaatagtggcctagacgctgccatattgatgaaccctaagacttgggaagcttcagggcatctaggtaactttaatgatccattaattgattgcaaaagctgtaaaacacgacaccgtgctgacaagttaattgaagacgcactatcgacagaagaagatgaaatgattgctgacggcctttcatttgaagaaatggaacgacttattaaaaacaacaacattacatgtcctgaatgtggtagtgaagactttacagaaattcgtcagtttgatttaatgtttaaaacacatcagggtgtaacgaaatcaagcacaagtgaaatttaccttcgaccggaaacggcacaggggatttttgttaactttaaaaatgtacagcgttcgatgcgtaaaaaagtaccttttggtattgcacaaataggaaaaagtttccgaaacgaaatcacacctggtaactttacgttccgtactcgcgaatttgaacaaatggagcttgaatttttctgtaaacctggtgatgagctagaatggcatgaatattggaaagagtattgcaaaaactggttgctgaatctaggggtaagtgaggagagcattcgattacgtgagcatgcggaagatgagctttctcattatagtaatgcaacaactgatattgagtacaaattcccatttggttggggtgagctatggggtgttgcttctagaacagattatgatcttaagcagcatatggaacactcaaatgaagactttacttatcatgatcagcaaacgggtgaaaagtatgtaccatattgtatcgagccttcactcggtgcagatcgtgtgacgcttgcctttttgattgaagcatatgaagaacaagagcttgaagatggcacttcaagaagtgtgatgcacttccacccggcgattgcgccatttaaagcagctgtcttcccactttctaaaaaactttctgaagaagcgcgtgcagttcatgctgagctatctaaatacttcatggttgattatgacgaagctggttcaatcggtaaacgttaccgtcgccatgatgaaattggtacaccttacgcgattacgtttgattttgattctgtagaagatcagcaagtaacaatccgtgaccgtgatacgatggaacaaaaaagaatgccgatttcacaactgaaaagctttcttgaagaaaaaacacaattttaattaaactagccgctcatgtacgagcggcttttctttactaatgaggagagtgagtgaaaggtgagaatactttgggattttgatgggacattatttgatacatacccagcgtttacaaaagtgatgaaacagttagtctcctctgccatatcggaagaagagatattgagggagttgaaagtttcctttcatcatgcaacagaagtgtttcagttaactgaggagcagattacagcatttcgcaaaaaagataacgccctttcgcctgacgacaaaccaccattcagaggattaaaaacgattttggaaaaagccgagttaaatgtgattatgacacataaaccacgtgctgaagtaattgctattttaaagcattttgatatggaacattattttgctgatctcgtagcaggtgacgatggttttccacgaaagcccgatcctgcttcttaccaccatttgaatgatcaataccatttggaccttgcagtaggggatcgcctgcttgatattattcctgcaaaagaagttggtatgaaaacctgtctctttcaaaatgactctccgggagccgatttttatgtgacaaattattatgacttaaacgaaatgctttggccttctaatcattcataatcaagtagttgatcccttttgtgttcaaatgtgataatacacatacgaacacaaaggggatgttttggttggataaaaaacttcggtttatattgattacatttttgttaggtgtttttctaggtgctcttgactcaggcattgtatctcctgcgttaacgacccttatagaagatctaggaattgacttaaaatggacggtttgggtagtaacgatttatacgcttgtctatgcagtaagcatgccaattgtagggaaacttgctgatttatttggaagaaaacgaattttcctaactggaattacgttatttgccattggttccgtaatcgctggatttagtcagtcactttcctttcttcttgttggtcgagctattcaagctctcggtggtggtggcattatccctattgcaaatgccgtaatcggaaacagctttccaaaggagaaacggggcatggcgctcggatttgttggagctatgtttggtatagcgacgattcttggaccaaatgtaggaggctttttcgttgctcagtttagttggagatggatattcttcattaacgtccctattgcacttattatcatcataatgggcttgaaacttcccgatgatcgaaaagagacaaaaaaaccttcacttgattggggcggagcaggcgtattatcttttgttatcataagttttctgcttggattaacgaatctggaaacaaatgaatttgggcaatcgatccaatcgctcatggtttggccgcttttacttattagtgttgtttttatttatccacttattcgagttgaaaaagctgcaaaagaccccattcttaaattaagttactttaaagaccgcaatatcgtgttagcattactcatttcaatgattacaggaattggcattattagtatgatttttgttccttcattctcagaaatcatattattactgtccagaggtcaaggtgggtacgttatgacgattctggcagtagcatctggttttgctgctcctataggtggagtgcttctcgacaagtggggagcaaaacaagtggtattacttggcttttcattaagtcttcttggttcactttcctttgtttatctagcagatggatggattacactatccctcgggatgattctgtctggtataggtatagggttcactatgggaacaccgttaaattatattattcttgagttaacacctgatcatgaagctggatcagctctatcactcgtaagtttgtttagatcggtaggtacttcacttggccctgttattcttgcaggatttatcgctatgtcaggagctatatttagcggaagcaaaatgactgaagcgatcagagatgtcattttatccggctatcaacatatgtaccttgctgcctctgttattttcttgattggtctcatactcggagtttttctgaaaatgccttccaaaggttcggaagttcaaagttcgtagtaaatggtagattcgctggattttttccttcattataatagcatacgaaaagccagatctgaacacgtatgttcgatctggctttttttattgtccaaacctgttaagaacttcatagaagtgtttaagaaattcgaaaaactttctttctgaaggggctagttctcttccttgaggaataatgacgcccacagtccttgtcacgttgggctctgataattcaatttttactgtttcaccaggcaactgttctgagagtgttatttcaggtaagagacttacacctaaccctgctgctacaagccccttaatcgtgtcaatgtcttccccttcaaatgcaattcgaggtttaaaaccaacctgctgacatgctgatgtaactagatgatgaagcgcatatcctgaacgaaaaagaacaaatggttcattcttcaattgtcctagtctcaacattggataatctgctaactcgtgtgagattggtagaagagcgagtagtttttcagtgaaaaagatgtggccttcaacatctgctcgatcttttggtactggagatacgaatgcaatatcgatttctcctttgctgacagcgtccgtcagatcttgcacagatccttgccttaattgaaatccaacgcttggatgctctttacgaaatgctgatataacagtaggtagcgttttggcggctaaactgttcggaaagccgatgcggattgttccggtatctggatttagaaattcgtagactgcttttctcgcacgttcaatctctgaaatggccgtctcggcgtgatccataaatatttgtccaacttgagttaactttacgtttctcccttcccgaataaataattgtacgccaagttccgattcaagattggcaatttgtcgacttacagctgattgagctacatgaagagaagtagctgctgcagtcacatgctctcgttttgcaacttccataaaataatataactgcctaagttccataaaaaagcaatctcctttttgattcatatcaataatagattaattatatctaaattatatattggaagcattggttaaagcaatgtacaatgggtgtagaatatttaaacaatttcgacgttatggcgttaaagcgagaaaccataatgaattgggataagagcgaggagtggaaatatggatagaacaaactttccagagaaacagggattatatgatccaattcatgagcatgacgcttgtggcatcggactgattgcaaatataaataatgtaccagcgcatgacattattgaaaagggagtctatatgctacgccagctagatcatcgcggagggcagggaagcgatcctgacacgggtgacggtgcgggcattatgctacagattccacacgaatttttccaaaagcattctgggtttaacctcccagctaaaggagagtacggggttggaatgatgttcctacccgttgataatcagctgagacagcgcgcaaagcaaattgttgaaaaagcaatcgaggaagcaggccaagaatttattggctggagaaccgttcctgtagatgaaacaacaattggagaagccgcatgtattgctcagcctgtcattcgacaggtctttattaagaagagcgatatttctgctgaagaatttgaacgtaaattgtatgtcattcgtaaaaaagcagagaaactagtatctcaagattcacagctatcaaagacgaagtattacgcagcaagtttctcaaaagatacgattgtttataaaggaatgctcacaccagaacagcttgatcaattttatttggatttaaaagatccaagttttaaatctgctttttcaatggtgcattcacgtttcagtacaaatacttttccaagctgggatcgggcgcatccaaaccgctacctcattcataatggagagattaatacgcttcgaggaaatgtaaactggatgagagcaagagaaggtgctcttcaatcagatgtatttggagatgatatgaaagacattgctccaatcgtacgaccaaacggaagtgattcttcatcattagataactgtcttgaatttttgaatctttcaggtcgttcattaccccatgcggcaatgatgatgataccagaaccgtgggatcgtgatgcaacgatgcttgatcctaaaaaagccttttatgaataccatagtacattaatggaaccatgggacggaccgacagcgatcgcgtttacgaacggtcgtcaaatcggagcgatgcttgatcgaaatggactgcgtcctgcccgatacgtgatcacaaacgatgatacgtttattctttcatccgaagtaggtgtcattgaaatcgatgaagagaaaatagtggaaaaaggtcgcattagccctggcaaaatgcttcttttagatcttgaagaaaagcgacttgtgtatgatgaagagattaaaacacaaatcgcaacagacaaaccgtaccgcaaatggttagatgaaaatttaatgaatttgtctcctaaagcaagtaaaacgagagaaattgatgagaaagagctcattaaaacgcaaagagcattcggttacacgtatgaagagttaacgaagaatattgctccaatggtaacagagaagaaagatccaatcggctcaatggggaacgatgtccctcttgctgttctatctgagcgaccgcagctattgtttaactactttaagcaactgtttgctcaagtgacgaatccaccgatcgattccattcgtgaagaatcggttacttcaacaatgacgctgcttggaccagagggcaacttgcttgaaacggatccaggaagtgctagaagaattcgacttgaaacaccgattcttaccgatagtcgttttgaggcgattaaagcattaaatgaagaggattttcatccagaaacattaagtttgctgtttgatgcagctcgtggtgaaacggaaatggaacatgctttacttgctttgttccgaaaagctgatcgtgccattaaaaacgggaaaagcatccttgttctttcagatttcggggttaaccgtgataaagcagcgattccatcattacttgctttgagtggtcttcatcatcacttaattaagagagaaactcgaacgaaagtaagtttaatcgttgaaacaggtgaggctagggatgttcatcagtttgccatgctaactggatatggtgctgacgctatttatccttatgccgcttacgattcaattgaccagatgattttggacggcaccattgaaggatttacgttcgatgaggcgattgaaaattacattgaggctgccacaaccggtatcgttaaagttatgtcgaaaatgggtatttcgactatccaaagttatcgtggggctcaaatctttgaagcaattggtgtaagcaacgaagtaatcgatcggtattttgctggtaccgcttcacaaattgacggcattccaatcgatattattgcgacagaaacgttgatgaggcatcattttgcttatcatgattccgaatatagtgatttaactcttgaaacaggaagtgaacttcagtggaggaatggaggagagcatcactctttcaatccgaaaacaattcatacgctacaacacgctgctagaagtaataactatgaactatataaaaaattctctggaatggctcttgaagagaatttaacttatcttagacaggcgattgattttggttcaaaagaagcgatttcgattgatgaggttgaaagtattgaatccattacacgtcgttttaagacaggtgcaatgagttatggcgctcttagtggtgaggctcacgaagctctcgcgactgcaatgaaccgcattggaggacgaagcaatagcggtgaaggtggagaagatccttctcgctttacgccagatgaaaatggggatctccgtcgaagtgcgattaaacaggtagcgtcaggtcgctttggcgtatcaagctattacttaagcaatgcagatgaaattcaaattaaaatggcgcaaggtgctaagcctggtgagggtggacagttacctggtaagaaagtatatccttggattgctgaagttcgtgggtcgactccaggggttggattaatttcaccaccaccacaccatgatatttattcgattgaggatcttgcccaactcatccatgatttgaaaaatgcaaatccatctgcacgaatcaacgtaaagctcgtttcgaaagcaggcgttggtacgattgctgcaggagtagcgaaagggctggcggatgtgattctcattagcggatatgagggtggaacaggagcatcgccaagaacgagtattaaacacgctggtcttccatgggaactggggttagctgaaacgcatcaaacgctcgtattgaatgatcttcgtgatcgcgtggttcttgaagcggatggaaaaatgatgaccggtcgggatgttgtgatggcagccattcttggcgctgaagaatttggattttcaactgcacctcttgttgttcttggatgtattttaatgagagcttgtcatttggacacatgtccagttggtgtggcaactcaaaatcctgaacttcgtaagaaatttatgggtaacccggatcatgtggttaattatatgcagtttattgctcaagaagtgcgagaaatcatggctgaacttggatttagaacaattgaagaaatgattggtcgtaccgatgtactgaaagtaagtcgtcgtacaaaagaccattggaaagcaagatatcttgaccttaaaccgcttctttatcagccgcatgtatccgatgaagtcggtagattcaaccagcgacagcaggatcataaactagatgctgcgcttgataatacgtcaattatccctgcagcacttggagcacttgaggagcaaaaaccttttgaaggctcttacgttattcgcaatacaaaccgtgtggctggtgcgctgttaggacatgagattacgaagcggtatggtgctgatggacttccagaagacatgattcgcctgcattttaaaggctctgctggtcaaagtttcggagcattcgtacctaacggggtgacaatgcagttagaaggcgatgcaaacgactatgttggaaaaggattatcaggcgggaagctcattatttatccttccgcaaaagcagggtttgctagagacgaaaatacaatcgtaggaaatgttgctttttatggagcaacttcaggtgaagcatacatcagtggacttgcaggagaacgtttctgcgtgagaaacagtggggcaaaagcggtagtagaaggaattggcgacaatggatgtgaatacatgacgggtggccgtgtcgttgttcttggtgagactggaaagaactttgcagccggtatgtctgggggaattgcctacgttctatcagatgatcaagaagcatttaagcgcaatgttaatgctgaaatggtccacattgaatcgttgagcaactatgaagagattcttgaagtaaagcatatgattcaacagcatgcttactttactgatagtccaaaagctattcgatttattcaaaactggaatgaagttgtagggaagatcgtgaagataattcctaaagaatataagcgaattacagaatcattagaagagcttaaagaacaaggctataaagacgatgacgcagcatatgaagtgttccaacaggcgaagaacggtgaagtaaagccgcgtaaaagtgatctggaaccggtataaggggaggtattcgattgggtaagccaacaggatttatagactatcctagagaaaaagcacgtgaaagagatctatcaacacgattaaaagattggggagaataccaactccctcaatctgaagaaaatttgaaaacacagggggcacgctgcatggattgtggcacgcccttctgccactcaggaatagaattaaatggtagtgcatcaggttgtccactctataatctaattccagaatggaatcatcttgtttatcaaggtaaatggaaagatgccctagatcgcctacttaaaacaaataattttcctgaattcactggtcgagtatgtccggctccatgtgaaggtgcctgcgtagcagcgattcctgatgatgcggttgcgattaaaagcattgaaaaagaaatcatagaccgtgggtttgctgaaggatggatgacacctcagcctcctaaaaatcgcacggggaaaaagattgccatcgtaggatcaggtcccgcagggttagctgccgctgatcagctgaataaagcaggacattctgttaaagtatatgaacgtgatgatcgtattggcggtttattgatgtacggcattcctaacatgaagttagataaagagttggtagagcgccgtgtaaaacttcttgctgatgagggcgtaacctttgtgacgaacacagaaatcggtaaagatgtgacgcaagatgagcttcgtgatgagcatgatgcggtgattctttgtacgggagctcaaaaacaccgtgacctaccaattgaaggacgtaagctcggaggaattcattatgcgatggattacttaaagcaaaatacaaagagtttgctggattccgagcttcaagataagaaatacgtttcagcagaaggaaaaaatgttattgttattggtggtggagatacaggtgctgactgtgtcgctacagcgcttagacacggatgtaaaagtgttcaccaatttggtaaacatccgcagttaacagcagatcgaatgattgataacccttggccagaattcccgaaggtttttactcttgattatgcttatgaagaggctgaagcagagtacggggaagaccctcgtcaatattccatcatgacgaaaaaattcgttggtgatgagaatggtcaagtaaaagagcttcatacggttacgatcgaaaaacatgttgataaaagagggaatgtattcatgaaagagcttcctggaacagaacaagtttggccagttgaactcgtcctaatcgcaattggctttactggtcctgaggaaggtgttcttgaacattttgaagtagatcaagataaccgtaaacgagcgaaagcagaatttgaagattatcgtacaaatgtagacggagtatttgcagctggtgatgttcgtagagggcagagcctcattgtttgggcaatcaatgaagggcgcggagtagctcgtgagacggatcgctatttaatgaacaaaacggttatgccttaataacaagaaaagcactccagcggagtgcttttcggtttgttacgaagaacgatctttcgtgtggatgatggcgagcacaagagcggaaaagctgaccattaacgacagggcctcaaatacgctaagcatcacatcactcctttacaaatagaatgtcacttacaggggttgtcctatacgcaaaaaagcgaagtatttgacagaatgtctggaatcaaatacacttaaatcaaatatctcgaattaaagatatttataactttcaaattagatgattaagatgaatgcaagtcgggaaccttctaaagtggataaaacaatgaaaaggagacttataacttatgaagcatacaactggaatacatcatattacagcaatcgtaggaaatcctcaggaaaatgttgacttttatagtggggtcttggggcttcgactcgttaaaaaaacagtgaactttgacgacccaggaacgtatcacctttacttcggaaacgaagaaggggcaccaggtacaattatgacgttctttccttggtcgaacgctcataatggtgaaatcggctctggtcaagtaggcgtaacaagcttcgtagttccaacaggtagcctatctttctggaaaaagcgtctagacaagttaaatgtggagaacggtgaaatgactcgctttggtgaaaaggttctcgcttttgacgatcctcatggcttgcatctagaacttgttgaacgagaagaaggtgaatccaatacttggagttttggcggtgttagtacgaaacatgcaatcaaagggtttgctggtgcaacgctattaacaggaaaaccagattcaacaatgacagttcttgaagaagtactcgggtttattcgtgttgcggaagaagaggatttcgttcgctttaaatcaagtgcttctattggtaatacgatcgacgttaagaaaacaccaatggcttctggaagaatgggttcaggcacagtccatcatattgcattccgtgctaatgatttcaatgatcatgaggaatggagaaatttactcgaagaaaaagagtatggtcctacaccagtcgtagatcgtcaatattttaatgccatttactttagagaagaaggcggaatactttttgaaattgcaacagatcctccaggatttgcaaaagatgaagaccctgatgaaatggggaaaaaccttctactaccaccatggctcgaggaaaagcgtcctgagattgaacaagtattagagcctgcaaacgcaagagtgcttgagggtgacaaataatgaaacacattttcaagcaaggaaaaaaggaccttcccgtattactcttacttcatgggacgggtggaacagaagaagatttgcttcctctagcagagctcgtggcgccggggcactcgattctgagtgtgagaggcaatgtttcagaaaatgggatgccacgattttttaaaagattagcagaaggcgtttttgatgaggttgatttaattgagaaaacgcacgagttaaatgccttcattgatgaatccgcaaagaattataactttgatcgaaatcatgttattgccataggctattcaaatggtgctaacattgcaggaagtttacttttccatgatgcaaacgcacttagaggcgcaattcttcatcacccaatggtgccactgcgaaatctgaagctaccaaatctttctggaaagcctatcttgatatgtgcaggagagaatgatccgatttgctctcctgaggaaacgaaggaacttcatgaaatgctctctcgtgctggggcagatgtatctgtccattgggaaagtgcagggcatcaattaacaaggtctgaagctgaaacagcggcagattggtttcataagcatttttaaatagttgagggaatactttatcatgggtatttaataataaaaaagcgagcatcaaattcgtacgattttgatgctcgctttttttcggtatgccagtttaggtagaggaaacctgtgttgaactaagaatttgttgtctagtgatggttattggtttattgttttttggaacatagaaaaatcaacagcaggctagtagttgtatgaagattagcgggttgaattaaattttaaaggcgtcgcaagtatttattgaaatacttggacgcctttaacgtatctactaaacagcagaattcgttgttttcttttcatcacgatcaatcacggcagctccaataatgtctcctagtacgtttgaagctgtaccagccataccgattagtacatcaacacctgcgatgagggcgacgatttctaatggtaaattaaacatcgtcaaaacagctgatagtgttactaagccagcagctggaatgcccgctgtacctattgagagaaaagtgccaatcgcaacgatggtcacataatccataatcgagaagtttaaccctgttacatttgcagcaaatacaatcgaggctcccattcttaatgcccctccatcagaattaaacacggctccaatcggtaaagaaaaattcacaatacgctctgaaataccggctttttttgcagagtcaatggctatcggaagagaagcaatactacttgatgtgaaaaaggctgtaagataagcgtccttcgtttgagagaagaagtttcgaatactcaactttgagtactttagaaaagaagtataaatcagtgcccacaacaacaaaacacccaagtaaaacacccctgtaaaagcgatgagagactggaaggtttgaaagccctgattaccgaatgatgttgcgctgatcgcaaaaataccaattggtgcataaagcaaaatcccctgtaatagcagaaagaacaagtcatttgcagatgagaaaagacgatggagcctttcacctgattcccgcagatcttttttctcggaataacgcattttccccatcgttaatccgatgatcacagcgagaaagagaatgccaattagctggccagaagaaaaagtttcaaaaaggttactaggtacaatgttaagaagcacatcagaaaagtcgggtgtgtctggcttttctactttagtatctggaagggttaagccagaaccggggttaatccttaaagcgattgtgacccctattaatacagcggcggctgtcgttaatccgtaatacacgagtagcttcccgccaagtcgaccaaagtatttcggattcatttgattaattgcgagcactactgttaagaaaatgactggaattgcgacaaggttaagcaagttgatcaaaatggtgccaactggtttgatgatttcaatacttggtccaaaaagaacgcctgttaatatacctaatagaaagccaatggtcatttttaatacgaaagaagaatttttatacaattgccacattacctgcatggttacacctcttattaaatagtgttattagtataacagctagaaaggaacttgtttagaaattatatttcctttttaataaaattcatttacaaaagtctatttatcattggataggggagttgtacttctgtttttaatagctacttaagaaattttatcttatttatatatttttttagaatagctttttttgaatagcctattcctctattatttgcttttgaagtcaaatggtatactaactaagaaggaattagaaggagtttagaagaatgatttatacaactgcagggagaccaactgaatcgcttgtgagagaagctgaaagattgagccaattacacaaaggcacatacataccaagggaaaaacgatcgattagccaacttatgaatctatgtgatgaaccacttatagttgttggatttgatcgcctttttctatacaaagatcatgcagaaaaaccggttttctttcacccgaattcagcgatgtttcgtacaaaagctctcttacgtggaggcagtgatgcgttcatccaggcgagcggacttaaaatagggatgagtctgttagactgtactgcgggtctgggagctgatagcatcgttgcgagccttgttgtaggagaagctggaagtgttcaagcaatcgaaggctcagaccatgctcttatacttcaagagggactaaaaaattggcaaagtggcgaggcaaagatcgatgatgctatgaggagagtagtcgtaatagggaagcggtatgaagctgttttaccgaatttacctgatgattctgtagatgtggtttattttgacccaatgtttgaagataccatacttgaatctgatggcgtactagaaatgaagaagattgccctgtacgatgcgctatctgaggaaatgataaaagaagcaaaacgaattgctcgtataagagttgttttaaaagattcatggaaaagttcacagtttcaaaagtttgactttcaacaacaaattcgaaaaacatccaaatttcattatggaatccttgaatgtaaggagtgaagcaatttgttaccagatcacttagattatgatttgaaaatcctgtttatcggtttcaatcctgggcttcaatcagaagaagtaggccatcactatgcgaatcctacaaatcgtttttttgctgtattaaataaggcgggactaactgaccggaagctctcaccagaagaagatcatagacttctagaatatgggtatggattaacgaatatcgttgatcgtcctacaagaggagcgagtgacttaactattgaagattatgtccaaggaagaaaacatcttttgaaaaaaattaatgtgtatatgcctttagtaaactgctatgtcgggaaaggagtatatcagaaattatctggtataaaaaaggttgattggggatttcaaccgattaatcaagtggaaggtgttcgcgactttgttgcaccatctacaagcggattagttaggatgtctcttaaggaattaactgaaatttatcgtcaattaaaactatattagaaaatttaggagggaatgagcatgacaaaaagaattaaaagtagtgaaagaaaagagttgttacctgaacaaagggaagaaatactttgcaaattaaaagaccgctttgagaaaaatatgaaccgtcataaagaacttgaatgggctaaagtacgatcaaaacttgaggagcattcagataaactgtggtctcttaatgaaatggaaatgacggatggggagccggatgttgtaggttatttcaaagaaagtgacgaatacattttttatgattgttcggcggagagtcctaaaggccgcagaagtgtttgttatgatctaaaagcattagagtccagaaaaaaattcaagcctgagaataacgctatggatatggcaacatccatgggtgctgagttattaactgaagagcagtatcgcgaattgcaaatgcttggtaatttcgatgtaaaaacgtcgagctgggtgcaaaccccctctgatgttagagaactcgggggtgcccttttttgtgatcgtcgttacggtcgtgtgtttgtttatcacaatggcgcagaatcttattatgctgccagggggtttcgttgctcggtaaaagtctaaagatgccatcaagatgaaggtattatcggggacatcattcgatcacttacactcgaaaaatattttttggacagagtgtcagcctatctagtaataagtctttaactgtgaatgaaaaacggtcaccatcttgtcctacaagatggtgaccgtttttttattatacaaatcgtagtaataaccgctttaacaatggtgttaaataagcgggtatttcattcgcagaaggaataacaagactttgcgtcccgtatatatttcgcattgtatttttctctttttcttgtggttctccgtttgataaaaagacgccgattacttcaaagcctttttttcgtgtttgaataacggcctcatgcgtgtcgatgataccattttcgctgtaatcatatgcggaaggctcaccatctgtaaaaacaagtaagattttatgtttttcattacgttcagcaagttcttgtgcagcttttcgaatcgcgtaaccatctcgattgtcttcttccggttccaattgcataatctttgcaccttcgtttagctgtgtggagcggttgtaatcaacaatttgaaaaagggtatttggttgttcctgatcatctgcatcgaatgcatcttcataaaagccagtgatggagtgtttaatattgagtccttttaacgtctcatggaaaagcgtaatacctaggcgcgtttcttccattttgtcatacatcgatgccgagcaatcgacgagtaacgagaacgtaacatctagttcagtactaggtgcgttctttttataaaagagacgaggattttcgtctgttaataacctaagcagcttacgattcaaacgtccaaagtggaggtcgcttcttggagcaatttgtttttgctcgatcgttttttggatcgcagagcgaagggacttttcagcatattgtatttcagctttcgcagttctgtaatttgattgctcttcaggtgatggcttttctgcttgacgaatcacttctctcacgtttcgattcgcttcaccaaggggctcatctgctcctgtgacagtttttgtatcatggctgtcaagaatagcttcttcatcaaactgactgccttctgattgttttgatgcgccctgtacgctgacaaatgcctgatctcctgattcttctttacgttcaccttctccaatcaggtcggatttagcgccttcttccaaatcaaattgaaggaagttggatccttcttgctcctgctcttcgtgccacgtattcatttcttcatcatacgtttctttgtcttctttatcagtcgtttccatcgtatcgtcactttttaactgacgagcttcttcatcctcaacaaaagcggagggggtaggtgagctcccatacattgttaaatattctgtagtcatatcgaaatggtcattatttagctcctggcaaaaagcgtttccgagagtggcgacgtcttttgttgaactcgctttagatatctcgataattaaatggcgcagatagggcttatattctgccaggtcatttccgagagcaactggtttaccgatcgcttggaggtagattgcgcaaaacaaagcatcaagcagctgatgctggcgattatgaacttcgagacgacctcggaaacgcttctgaaatagcgttcgtcttgtatcaaaagcagcactcattccaggtcggatagtcatacaaatcttctcaagtcttatatcttctaataacgcaaacagctgtttacgaaaaagaggatgtgatttgtttttgatagaggaaagatagcgatccacttcattaaaattcgtataatgaacattaccaagtgcacgaaggtagatatcgcttttcataccatcaaattgcgtgccatcaaaaatatcattccaataatgactgaccgtaatcaactgctcggccggtctgtaataggaatggaaagcaaactgtacttcactctccatgtgacttaatgtttccgcgagatcagataaactaagatgaagaaaaggatccgtctgattctcagcaaagtttagaaacttcatttacgccttctcctgataacgtccaaaaatcgtttccgcaatgttttctacggctgctttttcacgctcatcctcgagtttatcagtaatcgcacgtttaatcgcacgtctcgcttccataaatgttgttaaatcgcatgcatctaatagagaacgaggagatgctgcttcttctgaaacttgtccatcccttactttcgattgaaggtcagctgataaagtaacaaattgatcaagctgctcagaatcatctagaagagattgttcgttcaacatttcttttaacgcagacccttgtaagtaaggtacttctattacgataaagcgattttttaatgcttcatttaatggtgctgttccaatatatccttcattaattgcagcaataacaccaaagttctcttttgcacgaaccgtttcaccagtgaaaggatttagaaccatgcgacgatagtccagtacaccatttaaaataggaagagtttctgcctttgcggtattaatctcatcaatataaagaagttcaccgtttttcatcgcattttcaacaggaccaggaatgaatgtaatgtgcgcattattttgatcgtcataagtgagtgttttgtaccctagaagcgcttcagcatcaaggtcaacggagcagttaatcgagtacataggttggttaaagaagtagcttattagttcagccagttttgttttaccagctccagttggtccttttagtaacacattttttcctagaattagagccgttaaagcatcttttacaatcgacatgtccggtgcagtgtatcctttagatccgatgagatagtgatctgggtttgtattggcatctcgtctgtcttcaatacgatcttgtattttatctggaatatcaaacgtttcatataattgcatctgtcatacctccgagtttcaaattcacatctattcaaaagttaactataacggaaaaaaacagtccctgtctaatgaaagtcgtccaaaagccaacgtcaatcattttaccgggcgggatagatgagctatactagttctagcaagtaggcctaagaaagaagggggcataagaatgaagcctattcaaatagaaaaagtacaagaaattcttgaaacatttgaaaacaaagacttatatttccatctagaaacaacgagtggagcctatgcggcacaagataaagacaagcttgcagtcggagcttacataagaaatggttcgatcaaattcaccaacgtcaaaatggccgggagtggaccatttcgcgttgggtttaaattaaatgaaggctggatgtatgctgaaggattaacggattatcagttagatgatggtcggttgttaatggcaggccatgactcaagcggacgtttagctgtggccgttcaactaagctatacaccattcgattaaggaggaaatgattatggagaaacaagtcctcgttatcttcccgcacccggatgatgaagctttcggaactgcagggttgatcacgaaatttgtcaatcaaggcgtgcctgtcacttatgcatgtgcaacgctaggagaaatgggacgcaatatgggtaacccattttttgcgacaagagaaacccttccagaagtgcgtaagaaagaattgcaagatgcatgcaatgcaatgggcgtaaaagatcttcgcatgctcggttttagagataagacacttgagtttgaagatcctgaactgctcgtatcaacaattggaaagcttgttgatgaattaaatccatcattaattattactttttatccgaaatttggtatccaccccgatcatgatgcctgctctgcagctgtcgtagaaacgttaaaacggattccgaaagaaaatcgtccaacggtttatgcattgccaattactccggatcgtgaagcagtacttggtaagccagataaagtatttgatgtaacggatgtgttagaaacgaagattaaaacgattgaagcacatcgttctcaaacggaagcaatggttgcaagacttgaagatggttcaatggatcctaactccgaaatgatgtcgttcattaagcaagaatccttctggatctacccatttgatgaataagatctgaagcgttcatatctattccgaacagaacgtgatataatttgcactataatatgatagatggaggaatacgacctaaatgattacagttacagatgtcggcttacgatatggtgatcgtaagctttttgaagatgttaatattaaatttactccgggaaactgttatggactaatcggagcgaatggtgctggtaagtcaacgtttctaaagatattgtcaggtgaaattgaaccgcaaacaggcgatgttcatatgggacctggtgaacgtcttgccgttctaaagcaaaaccattttgaatatgaagagtatgaagtgttaaataccgttattatgggtcatgcacgtcttcatgaagtgatgcaagaaaaaaatgcgatctacatgaaagaggatttctctgatgaagatggtatgaaagctgcagagctagaaggtgaatttgctgaccttaacgggtgggaagctgaatctgatgcagccgtattgctgaaaggtcttggaatttctgaagatcttcattacaagaagcttgcagatcttaccggttctgagaaagtaaaagttcttcttgcacaggcgctatttggttccccagatattcttcttctggatgagcctacgaacaacctggaccttagtgcgattcaatggctagaagagtttcttattaactttgaaaacaccgttattgttgtatcccatgaccgtcacttcttaaacaaagtatgtacgcacatggctgaccttgattacggtaaaattcaagtgtatgtaggtaactacgatttctggtatgaatcaagccagcttgctcgtacaatgaaagaagatgcgaacaagaagaaggaagagaaagtaaaagaacttcaagcgtttattcagcgttttagcgccaacgcgtcgaagtccaaacaagctacatctcgtaaaaaacttcttgataagattacgcttgatgatattaagccctcttcaagaaagtatccttatgtagcattcacaccaaatcgtgaaattggaaacgatgtgcttcacgttgaaggtttaacaaaaacgattgatggtgtaaaagtccttgataacgtgagctttatgctcaataaagatgataaagtagcacttgtaggtcgtaatgaaattgcgaatacggcgctaattaaaatcttgatgggtgaaatggaagcggacagcggtacgttcaagtggggcgtaacgacttctcaagcttatttccctaaagataactcggaatactttgaaggcgtggatacaaatctcgttaactggcttcgtcaatactctccagaagatcagagtgaaagcttccttcgcggtttcctaggaagaatgcttttttcaggagaagaagtgttgaaaaaagcaagcgtcctttctggtggagaaaaggtacgctgtatgctttcgaaaatgatgctaagcggtgcgaacgttcttgtacttgacgatccaacaaaccatttggatcttgaatcaattacagcactcaacaatggtcttatgaacttcaaaggtgcgatgatcttcacatctcatgaccaccagttcattcaaacgatcgcaaacagagtaattgaagtgacacctaaagggatcattgataaagaagcaacttatgatgagtacctcgaaaatacagaactacaagctaaagcgcaagcgatgtataattaataagttaaaagcgggttccctaaatgggacccgcttttattcgtatatcgttcgttttgatttttgaacatgacgcaaacgaagaaataaggtaatggccgcaacaaaaagcccggcgctaaggccgacccagtacccatatggaccaaacgcagagtatttcgctagtaagtatcctgaaggaagaccaatcacccaataagaaattaagctcataacgagtgtcacattcacatccttatatcctcggagtgctccctgaattggagcagcaacagcatctgaaagctggaaaaagatcgcgtagattaagaatactttaattaaatcgaatacgttctgattactcgtataccagcttgctacagcatcattgaagagatataaacaaagagctgaaaacaaagccataccaactgcaaaagcgatgcccatgtaactgtagtgcttcgcgtcttgtaatcttcttgcgccaacttcaaatccgatggcgatcgttaaagccatagaaatactaagtggaatcatatatagaagagaagcgaagtttatggctgcctgatgagcagcgatcgtttcggttgaatacatgctcattaatagcgtaacggctgcgaaaatactaacttcaaaaaagatggaaaaaccaatgggtacaccaatttttaactgttctttccaagtggaaaatgagattggataaaaacgtttgaagatgtcgtatactctaaaaggtcttacttttatcacgacgagtaatgcgattaaaagaataaaccagtaagtaatcgctgatgcatatcctgcaccaacaccacctaatttagggaatccccattttccaaagatgagaacgtagttgaaaaatacattgattggaagcgatgtaagtgtaacgagcatcgtggttcttgtctctccaagtgcgtcaaagaaacttcttagtacggagtaaataaacagtgggataatcccaaatgaaagtccgattaaatactcttttgcaatttgagctacgttgtcttgaagatccattgtatttaaaataggatccaaaatgaaactcccaactactaaaatactaatcgataaagcaatggaaagataaatgccctgcaggactgaaaaggaaacgcgttcttcctgtttggccccaatatagtgtgatacgattggagttatggcaagtaaaatgccgcttaagcctgtgaagacaggtacccaaaggcttgagccaatcgcaaccccggcaagatcatttgctccagctctcccgctcatgatcgtgtctacaaaattcattgaataaagaccaacttgcgtaattaaaatcgggtacaaaatcacaaataatagtttgattttttccttgagtgaatgagttggatacatggtgcaacatccttgctatgtagaatactgaacacggaaattatagcacattctgcatcaacaattagaaagttatgctacacttaatatgtgaaatagtgaacatataaaaatgaggtgttaaaacgtgaaaaatcgagaaggcgtggatacaaatatcattctatttgatggggtttgtaatttatgcaatggattagtaaagtttatgtttaaatacgataagaaagccgttttctcttttgcatctcttcaatcagaaacggcagagattcttcttaagaaagctggtcttacagaagtcccagatagtgtgattgtgataaaagaagggaaggcgctcgttaaatccgaagcggcactttcgatcattaaacaacttggtggattgtttaagcttttgctagtatttcgcttattcccacgttcaattagagatcggatctatgacgaagtagctaaacgtcgttataaatggttcggaaaaaaagaaagctgtatgatcccaacaaaggaacaaagaaagcgatttttgtgaaggtgaaaattctgatggtactggaaataaagattgagaggattcccgttaaaaatgttgaaaaataggtttcacataataaaacaacctttattttaatgattttgattaaaatacgaacgattacgtaattttattaaataatattcatatttttagttgaagatagattgtgggtttgttatggtaggtaagtactaactaaatcaattttcactcgtatattctcagaaatatggtctgagcgtttctacccggttcccgttaaagtactggactacgagttgaagtatgctgataactgtctttaactttatgaataagaattagatgacagctattttttgtatacttgaactttcgtaggtctggagggtagaacattttctacataatccagactttttttattttcatgaatacgagaatgatcatctagaagggagcagcaaaagaaaaggttagtcagtcacgattaacgtgtttatttaaaagaagtatccgaacttacatactagggagagagcaaccatgaggaaaccattgattaaaaaatacgtagccacaactatgataactttacttttgctaagtgttttgtcagcatgcaacactgaatcaaaatcttctgcagagcaagaagcaacggagcggcccattcttgttcaggggccaatgccaattgaagcagaagaatttgcacaaaaactagagaatgtaacggaagaaacttcaggttcgtttgttttttataaaggaacggtagataattatccagttatcgttgcaaaaacgggcaaaggcatggaaaatacggcagccgctactgccgtagcaatcgagaaatacaatccacttgcgattatcaaccagggtacttcgggtggccatgaccctgaattagaagtatttgatattgttttaggcgaaagaacgacgaatatcggatctttaaaaacggttaacttgaatgaggatgaaggtataaagccaacggaatggaagccaatggatttaatggcgtctgaaggtagcgcaggggaggatcctgatgcagaaaacattcggtactttgaaggagatcaagacctacttgctgcagcaaatgctgtgaaggatgactatcaaaaaggaaaagttgtggaaggaacgattggttctgccgacgtgtggaataatgaaattgatcgtattaagtggtttcatgagaagtatggtacttccgttgaagaaatggaaggcgctgcaggagcacaaatcgctcaagcctacgacgtacctttccttgggattcgtattctttcaaataataaagtaaacggaggagaatacaacccaaatactgctgaagctaatcaggagtatgtttacaaagttgtccaacagtatataaagaatcaagaaaataactaaaatcccgccgggtttaaacaagaaacagcttaagtaataagtgcattgtaagacgcacttttcttaagctgtttttttattttcttatctatctaactttcctgcttgcgacagtatgctagttttttgtgcttttcattttacactttgtatagtgtatcaaagaaatgaatcttctacacttttattagaaagaaaattcagttaattactcgaatgggagggtatacatatgtcagattcagtgaaaattgggttgattcaggccaaaaatgatgtcgatggtaacgaaccggttgagctgcataagcaaaaagcgattgaaaaacatattcagcttgtaagagaagcaagtgaaaagggagctcaaattgtctgtttacaagagattttctatggaccgtatttttgtgcagagcagaatacgaagtggtacgacgctgcagaagaaattcctgagggaccgacgacggtaaggtttcaagcacttgctcgtgaacttggaatcgtgatcgtattacctatttatgaacgtgaaggtatatcaacctattacaacacagctgctgtccttgatgcggatggttcatatcttggaaaataccgaaaacaacatattccgcacgtagcggttggggacaacggacacggcttctgggaaaagtattattttaagccaggaaaccttggatatcctgtgtttgatacgactttcggaaaaattggcgtatacatttgttatgatcgtcactttcctgaaggagcgcgcttacttgggttaaacggagcagagattgtttttaacccttccgctacagtagctggactttctgaatatttatggaagcttgagcagccagctcatgctgttgcgaacggctactatttaggagcaattaatcgcgtcgggactgaagctccatggaatatgggggaattttatggccagtcatatttggtagacccacgtggcaactttgttgcgatgggctcgcgtgatgaagatgaagttattatcggtgaagtgaataaaaagatgattcgtgaagttcgagatacatggcaattctatcgtgatcgtcgtccagaaacttacggagaaatgacgtcgttattgccttagcgagcaggtgtggcttggccacctgctttttcatttaaagctcttgcagaagagctcatttaattatagggggggacccatatgagtactagcgaaccaatgattcaaagggagcttcagaaacgatttaccgaggtcacaccaccgctcacgaaccaggaagcgtttcaagaatcgcaaaggtgtctgtattgttacgatgctccgtgcatccaggcgtgtccaactggcattgatattcctacctttattaagaaaatagcgtcagataatatgaaaggttccgctaaaacaattatgacagccaatccagtaggagcaagctgtgcgagagtttgtccaactgaagaactatgtgaaggtgcttgcgtacttaaccattcgactaaaccgattttaatcggaaaccttcaaagatatgccactgattgggcaataaaaaatgatcaggtactatttaaagaaggtcaaccgaacggtaagagagtcgccattgtaggtggaggtccagcgggattatctgctgctcgcgagcttgctctgcttgggtatagtgtgacggtttatgaagctgaaaagcaagctgggggtctcgatacgtatggtatcgtctcatttcgcttaccaaaggcaatatctttatgggaagttgagcaaatcgaaaacctaggcgttacgattaaaacgggtgtgaagattggcaaagatatcccctttaatgagcttctctcaacgaatgatcgcgtgattttagcaattggaatggcaaacgtccctgatcttcaaattccaggagaaaatgcggagggcgtttatgatgcgattgaactcgttaagatgacgaaagacgcaccattcccaactcacttaaaagataagaaagttgttgttattggcgcgggcaatactgcaatcgatggtgctacttgctccgttcgacttggtgcagaaaatgtgaaaattctttatcgtcgatccgaacaagaaatgaccgcctatgattttgaatacgagttcgccaaacaagatggcgttgagtttcgctggttaacacagccggtcgaaatcctcacaaatgaatcaggagaagtaaaaggaatgaaatgcgttaaaatgaagctttcagaagcggctgaagatgggagaaggagaacagaacctatcccgaactctgaatttttaattgaatgcgatgcgatcgtaaaggcaattggtcaaaagcgccatctttcttttattgaagatcttggtcttgcgcataacgacggtgttattttaattaacccagatacgatggaaacatccaatccaaaaatctatgcttgtggcgatgtgatctttggaaaaggtcagggggaagccatggttgtttccgcagcacaacaggggaaaacggctgcttatcatatgcatgaaagcttaaaagaaacgtactcagcgtaactggagaaaggggaatatcgatggcagatcttagaacgaatcttgcggggattacttcaccgaacccattttggctcgcatctgcaccacctactaactcaggatatcaagtgcagcgtgcgtttgaagcaggatggggaggggctgtttggaaaacgctaggggatccgattttaaatgtttcttcaagatatgcagccgttcactttaatgggcaacgagtagcagggtttaataatattgagctcatcacggatcgaccgctggaagtgaatttgaaggaaatctatgaaacgaagaaaaaattcccgaatcacgccgtagttgcttcgttgatggttgagcccaatcaagaagcatggcatgaaatcgttaaaaagacagaggcggcaggtgtagatggtctagaacttaactttggttgtcctcatggaatggctgaacgaggaatggggtcagcgtctgggcaagtgcctgaacttgtagaaaaacaaacctattgggcaaaagaagcggctgaaacaccagttattgttaagttaacacctaatattacggatattaccgctactgctgaggctgcagttagtggtggagccgatgcggtgagcatgattaatacgattaatagtcttgcaggagtagatattgatacgtggctacccattccgcatgttggaggaaaaggagcccatggtggctattgtggacctgccgtgaagcctatcgcattaaacatggttagtgaatgtgcaagaaacagtcgtattaatgttccgatttctggtatgggtggcgtatctaattggcagaatgcgattgaatttatgttaatgggtgcaagcaatgtacaaatatgcacagcagcgatgcaccacggtttccgcatcgttgaagatcttatcgacggtttgtctacttaccttgatgaaagaggcattctttcagttcaagacattattggaaaatctgttcctaccttttcagactgggggaacctcgacctcaattacaaagttgtcgcgcggattaataatgacgtttgcatcaattgtaacaaatgccacattgcctgcgaggacacttctcatcaatgtattgacatgttaaatgatccaaatggacatgccattcttcaagtaagagaagaggattgtgttgggtgtaacttatgttcaatagtatgtcctgttgatggagcgattgatatggtagagctcaaaagtgatctaccacagatgacgtggaatgaacgtcaatctcttatcggttcgcttaaagaccggaaagtaaccaaataagtaggaggactttaaatgaaaaagatcattcgaaatggaacaattgtaacagcaagtgaaacgtaccaggcagatattcttatatcagatggcgtcatctcttctatcggaaaaagcattgaagtggagggtgccgaagttgttgatgctacggatcgctatgtttttcctggaggtattgaccctcatacacatcttgaaatgccatttggaggcacagtaactaaagatgattttgagactgggacgatagcggcagcgtttggcggaacaacctcggtcattgatttttgtctcactgaaaaaggaaaaccactttctcacgcaattaaagcgtggcatgacaaatcaaaagagaaatcggttatcgattatagctttcacttaatgattagtgaaataaatgacgctgttttggatcaattacctgatgtgatcaatcaagaaggaataacatcttttaaagtatttatggcctataaaaatgtatttcaagccgatgatgaaacactttatcgtacccttttagcagcgaaagagcatggggcgctcgtcatggtacatgcggaaaacggagatgttatcgagtatttaacgaaagaagcgctagcaaaaggacagacagagccgatttatcatgctcttacaaggccaccggaagttgaaggagaggccactgggcgtgctgcacaattaacaggactcgcttcttctcaattatatgtggtgcacgtaagttgtcaggaagcggcggataaaattgcggaagcaagaaagaaaggctatgacatacatggagaaacgtgtccgcaataccttgttctagaccaatcgtacttagagaaacccaatttcgaaggcgcaaaatatgtgtggagtccacctctgagagaaaaatggaatcaggaagcgctctggaatgcacttagaacagggcagctagaaacaataggttcggatcagtgctcttttgactttaatggtcaaaaagatttgggaagagatgattttacaaaaataccaaacggcggaccaatgattgaagatcgatttagcattcttttttcagaaggtgttcgaaaaggtaggatttcattaaacaaatttgttgatattacttctacaaaatcagctaagctatttgggttattccctaagaaaggaaccatatcgattggagcagatgccgatttagtcattttcaatccagaaacaaaacgaaaaatttctgccgacactcaccatatggccgttgactacaatgcgttcgaagggatggaagtgactggtgaacctgaaacagtacttgtaagaggagagtttgttattaaaaacaaacagtttgttggaacaccgggttcaggacagtatctaaaacgagcaaagtatggcaagacgacaaatatgacagacaagccgatgatgatccagtaagagactgaaaaaggagatagctgaatgaaaaaagaggaaagctatttaaaatcacctgatcttttgccaattgctcataaggataaaaagatcgggaccggcgggtttgccatgatgtgggttggaatggctgttgtgcttgcagcgtttgcaattggtggagccggggttcaatccttatcactgacatgggtcgtcgttgcaacgattattggaaccattggaattgggttgtttattacggtgataggtgatattggcattgaacatgggttatcttttcccgtttatatgagagcgccttttggaacgattggaacccatataccctcaatcgttagaggacttgcagcatcattctggtttggaatcaacacttactttggcgcgaccgcgatgaatgcgatattaaacgttctatttggatttgataactggttcgtctgtttccttatttttgctactgttcagcttgttaatacagcgcttggcattaaagctgtggaacgattcgcagatcttgccgccccggttattatcattatttcggtttggatgtacgcttctctttcagaacaagccatttctcaaggcagagaagtgtgggcttggattgaaagtcccgtaacaggtggtgctgcagtaactgcctttctcgtcgtcatctttagtaatatgggattttgggcaacgatttcagctgacattccatcgatttctcgcttcataaaagcccctaaatttgaacgaagctgggtaaaaagaaataaaggaacacttgtcggaagtatggttgcgttaccgattacccagaccttcatggtcgtgatcggtggtgtgtcttacattgctgtatcaaattacgatccagtagttgcgttacaagaagccgcgacgggtttggtactaggtgtccttttattaatgattgtacttgcacagtggtcaacaaatgtttctgcaaatcttgtgccagcagcaacgattttttcaaatgttggaggcccaagagtaccgttttgggctggggtattcattgcagggattgtcggatcggtagttcagccttggagtctatttaatatacttatccctattctattgatcgtgggtgggatcttatccgctatcgttggtattctctttgctgactattaccttttacgaaaaagacgagtaaatgtgccagacttgtatgagaaagatggacagtatcgctatatgaatggggttaatgctgctggttttatcgcctggttcatcgggggattggctgcctattttctttctaactactcgtttttagtcggctttcttgtaggcgccggcacttattacgtattagcaaagtactggtggttcaaaaaatacaaacaagcagaaatgcttgatccgagtgatgagaaatatctcggcattacagttgggcgtgattggatcatcggaagtgacagtgaatctcaagctgtgcaagaagttggtagtggacttgatgaagggaggtaaggtgatgaaagaacatcagcattacttaattgaacgcgagaagatcgactattttattgatcgtggctatcatattaatggaattacggaaaatttaagtggagccttcatcgagtttgttctaaaggacgtaaagtcaggtgaaatttcgaatgaaattcttcatattcagacagcaaatgggagaaaatatttctcagctcttctattaaaacagatccaatccgttacttaagtgaggagggaagagatggagtacaacttgtattcaaaagatagcgcctatccatgtgaagtgacgatcgacgaggaaaacggtcgctatatgataagaaaagcggatacgagtggagaaatatttaattcagcagcggaattaacttcatggattcgatccaattggaaagagacggactttagaagtaaaaaacagtattattatctcatggaactattagatgaatatgaatgggaagtagaatccgggcaatagttgcccggtgtttttttgattattaattaaatttcatataccgtattaatataaaacaattaaaatctgtcattatgactaatagtgtcacaatatagagaataactagaaatgactttgatgatatagtaaagttattctcaaaagatgtaagcgctatcataaatgatgactgaaagataatcttccgtaatgccccaccattacaaaacttcatggttagattaaacatataatcttcagaagaggaagtgatcggatgctgcgaatgaccagtttaacagtccatgaagtgttagaaagagatcattttcaacatgctactgtcatagctggcaaagagggcttatctagacgtattaaatgggtgcacgtgatggaagtaactagtgttaaacaattattacacggtgaagaattaattctatcaactggttttgtatggaaagataatgtgcaggtttttcattcgatcgtaaatcaattgatacaaagtcatgctgcgggtctttgtattgaaattggtacatatatggatcatatccctaaagaaattatcgaacttgctaatcaacatcatttccccatcattgtatttacaaaagaagttcgctttgtagatatcacgcaagaccttcactcccttttaattgctcatcattatcagatgatttcagatctcgaacaattttcacaagaactcaaccgtctccttcttctaccaggctgtttaacgaagattttatcgctattgtctactaagacaggtatgcaggtcatttataatccaaaagaagcagcgcctatttttgtgccagaagcgacagaagaaaaacgagaaacttacttgcattttctgaaaatccaacctgacgggaaagggctagtgctccaacccgttcgtgcaatggattatcattttgcgaaccttagccttgttccagcacagcatgcgtctgtctcagattatgacatgctactacttgatcgaagcgcaaccgcaattgctcaatatcttctacgagagctatatattgaagaaaagaagcgagcactagagaccgagtggttatatgaatggcttgaaggcaagcacacggaagaacgaattttatcctatctcgttgacgtagacgaaacgctcattccacgtggacttcatgtctgtacatgcaaatttaaaaagcctcatgattcatatacatcttctcaaatgacgtatttcatgcttcttatgcgttcaatgtttgagcaagaaggtttttttatcttatcgttaacaactcggaataagctgatcatcatcgttttaaatcgacggacagaagaaaatgtggaagagcgtttgcgtgaagcttttaaccgttttctacaaagtgatattttacagaaagaaacagtacctgaagttgaaaaagtcggtgttggtaaacatgtccgattattaaaagacatgcataaaagctatgattcgtcgcttgaaaccatcatgatgaatgacaagataccgacacaatcttcactcgttacctattacaatgactttcatatctaccgtatgatcttacacctggcaagaggtaaagagctaaatgagtttatgtatgattatttagatccagttattgaatatgatataaagaacaatagtaaccttttaaacacattgaaagtctatatgtgttgtaatggttcaaaaaaggaaactgctgaacaactttatgtagtgagacaaacactctatcatcgcttagaaaaactagaggaattgcttggtcaagatttcatgtgttctccgaaacgattagcaatcgaattcgctattcatgcatacagttatttaaaacagcagggttaaatgtgcaacgtgtacaaaacgtaacatatccatgttacgttttgtctaatgaatgaaagccgttacatcccctacaatgaaaataggaaagattaaaggagggcatgtaatgactgttgtaaaaaaggaaaccactttattaaaaaactttgtcaacggagaatgggtgagcgccaaaagtaaagatacgcttgaggtaccaaatcctgcaacagatgaaaacctagcatatgtgccactgtcttcaaaagaggacgtggatcttgcagttagtgctgcatcagttgcctttcagacgtggagtaaagtacctgtcccgaaaagggcgcgcatcctttttaagtatcactcccttttaattaaacaccatgatgaactagcggaactagttgtaaaagaaaatggtaaaagttttaaagaagctcatggagaagtgcttcgaggtattgagtgtgtggagtttgcaacaggtgcaccttctttaatgatgggagataatttatcgacaattgcggaaaatattgattcagaaatgttccgttatccagtaggagtagtcggaggaattacaccttttaactttccaatgatggtgcctcattggatgtttccacttgcgatcgcgtgtggcaatacgtttgtcttaaagccttctgaacgaacgccaattcttgctaatcgtatggctgaattattaacagaagcaggattaccaaaaggcgtatttaatatcgttcacggagcacatgacgttgtgaatggcttattggaacatgatgacataaaagcaatctcatttgtaggatcccaaccggtcgcgaaatacgtctatgaagaagctgcttctcgtggtaaaagagtgcaggccctttctggagccaaaaatcatcatattattatgcccgatgctgatattgagaaagctgtacaacaagtcataagctcaacatttggtagcgctggccagcggtgtatggcttgtagtgctgttgtgattgttggagacggtgagtcatttattactgcacttaaagaaaaagcagatgatttaaaaatgggaaatggtttagatgacgaagttctattaacgcctgttatccgaaaatctcatcgagaaaaagtaatcgggtatatcgataaaggattagaagaaggggcagcgttaattcgtgatggtcgcagggaaatggatgcccacgaagaagggaactttcttggaccaacaatatttgatgaagtcacgcctgaaatgacgattgcgaaagaagaaatatttgcacctgttctaagcttgctacatgcagattcgatcgattccgctctcggcatccttcgtaaatcgcgatatggaaatggtgcgactatttatacgaaagatgcaggtgtgattaggcaattccgtgaagaagcagatgcggggatgcttggtgttaatgttggtgtaccagcacctatggcttttttccctttttccggatggaaagattctttttatggagatctgcatgcaaatggaaaagatggtgtgaatttttatacgagaaaaaaaatgattacaactcgctttgactactagaggggagtgaagagtatgcaaactgctcacgagaatcttgcaggaaaagacgagaaatacgtttggcatgcgatgcgaccatatgatccgaaatcgacaatggtaattgaaaaagcaaaaggcgcgtggttatctgattacgatgggaataaatttcttgatgctatggcgggtctttggtgtgtaaatgttggatacggtcgagaagagctcgctcaggcagctttcgaccagcttaaagaactatcttattatcccttaacacatacacatgctccggcgataaaattagcggaaaagttaaatgaaatgcttggtggaggatatgtcatctttttttcaaatagtggttctgaagcaaatgaaactgcttttaagatcgccagacaatatcatgagcaaaaaggggaaggaagcagacataaaattgtttcacgctatagagcgtatcatgggaatacgatggggtcattagctgcaaccggtcaggcgcagcggaagtataagtatgaaccgcttggccagggctttttacatgtgcagccaccagatacgtatcgtgatgttgaagacgatcgagttcaacttgcttctgtcaaagcagttgacgatctgatgacctgggaactgagtcagacagtagcagcaatgatcatggagcccatcatcacaggtggaggaatcatcatgcctcaacaagattacatgaaatccgtaaaagaagtatgcgaaaagcacggtgctcttttaatatgtgatgaagtaatttgtggttttggaagaacagggaaagcatttggttttatgaattatgatgtaaaaccggacatcgtaacaatggcaaaggggctaacaagtggataccttcctttatctgctacagcggtgaaagaagaaatctatgaagcatttaaagggaaagattcatatgatcactttcgtcacataaatacattcgggggtaatcctgcatcatgcgcacttgctttaaaaaatctagaaattatggagcaggaaaagctttttgaccggtcgcaagaattaggagaaaagctgaagcgtcaattaacagaacagttatcttctcattccaatgtcggtgatatccgtgggaaagggttgttgattggaattgagcttgttgaagacaaaaggacaaaaaaaccgcttgacgtgggtgagcttaataaagttatcggttattgcaaatcgaagggagtaatcatcggaaaaaatggtgataccgtagcaggttataataatgtgcttacgatggcccctccattaatgatcgaagaaaaagatatcgatttactggtggaaaccattgtagcaggattatcccatttataaagtgcgcttcgcgcgcactttttcctatgagcttgttataaaaaagattgaataattaaaataattggtttatagtaaaggtgttacataccgactggttagttaataaaggaggatggaaatgaaagcgattcaattaacagagtttggtggcccggaagtattaaaactaatcgacttggatgtccctgatccaaaaggacacgaagtattgattgagattcaggcaatcggagttaattacgcagataccgcaagaagagaaggccaatatgttgtggaaacacctctaccatatgtgccaggatctgaagtggctggtgttgtaaaagcagttggagaaaaagtgacttctgtaaaaccaggttcttcagtggttacattattaggaacgaaaaatgcaacaggttatgcagaatatacgttagctgatgaaagaggactcattgcgattccagaaggcgttgatcctcagtatgcagtagctctcccattacagggattaagtgcttatcacacacttaagacaatggggcgttttgaaaatggtgaaacggttctgattcatgctgcagcaggcggcgttggaacaattgccgtacagctcgccagactatggggagctaaaaccattattggtacagcaagcagtgaagagaaaagaaagcttgcagctgatatgggagcagatattacgatcgattatacgaaagaaggctgggaacaagaagttttagaagctacggaaggtaagggagtagacgttattcttgaaatggcagggggagacgttttcagaaaatcgttgaattgccttgctcctttcggacgactcgtcatatatggggtagcaagtggagaacaaagccgcttttatccatcttccttaatggagaaaaatcagtcagttgtaggctttttcctaccacagatgatgcgtaagccgtctctttatcagaagagtctagaagaactcctaaactatatgcagactggagaacttaaattgaccatcggtggagtttttgaattagaaaaggcagctgatgtgcatcgtatgcttcaaggacgtcaaacaaaagggaagttaatcctaactccttaattgcagaaggaagcgtacatcaaacaagacgaccgaatttggtcgtcttttttacatggagaaattagttttgatattctctgttagaaaatcgatattgcctattcactatgttaacactttgtggtaatttagtattgcactgtgttaatattcgaaatatttttcagtgaaactttgatgttattgaaatttttttcggaaatttgcttgaaagttttgtgagcaatctaatactatgctaaaatatcaatgaaagcgtttttttaaaagaatgtttcaaaaagtgaaaagagtgtaaagaactagtaagaaaccaaacattaatgaagttagaaacggttcaatgcacgatttgagattaaacccagcagggaggtagcatgctttgaataccaaacagtccagagtggaacatccatggcaagaattttatggaccaaaccttggctatgccattgaattatacgagaaataccaggaggatcctgagtcagttgatcctgaaatgcgccaaaaatttgatcagtggggacctccaccttcatcccaggaagtcattgaatctactagtcagcccgccaacctcaaaaaggttatttctgctgttaaattagccgacaacattcgtacatatgggcatttagcagctgcaattaatccgctaacaaatgaaaaatctgatcaagatttcatgacacctcaaaaatacgggctttccgatgaagacttgaaagcgattcctgctcaggttatttgggagaatgcaccaagagatgtcaccaatggattacaagcaattcaaaaacttcaggatctttatacaaagtctatgtcttatgagtttactcatgttcatgctgaagatgagcgtaaatggttagatgagatggttgagaacgattctgtaagccgtacgcttacgaatgacgatcgtatcgcactgctaagaaggctaacagaagttgaaggcttcgaaaaattccttcataaaacatttgttggtcaaaagcggttctcgattgagggcgttgatgctatggtgccaatgcttgacgatgttattaaatgcggtgcaagtgatggcgcgaagaacgttatgattggaatggctcaccgtggtcgtttaaatgttcttacacacgttttaaataagccatacgaaaagatttttgcggaattccaccatgcaccaaacaaagaactagttccttctgaaggttcaatgggtataaactatggttggacaggcgatgtcaaatatcacatgggtgctgacagacaaatcgaggattcggaaacagctagtgcaacgattacactggccaataatccaagtcaccttgagtttgttgatcctgttgtagaaggctatgctcgcgctgcacaagaaacacgtaatgaaaaaggtgaaccgaagcaagatttcactaaatcttttgcgatattaatccatggtgacgctgcttttccaggcgaaggtgtggtagcagaaacgctaaacttaagtcagctaaaaggttatcatacgggtggcacaatccatatcattgccaataaccagctaggatttacaactgaaagcacggattcaagatctacaaagtatgcaagcgatcttgcaaaaggatacgaaattccgattgttcatgtgaacgcggatgatccggaagcttgtcttgcagcgatgcatcttgcttatgaatatcgaatgaaatttaataaagatttccttattgacttaattggctatcgtcggttcggtcataatgaaatggatgatccagctgttactcagccacatttatatgaaaaaattaagaatcaccctactgttcgagcaagctatgcaaagtatttaacagagcaaagtgtgatcgaagagggtcagggtgaaaaggtagatgaagaagtactttctgagctccagaccgaatacgataagattgccaaaggtggagacggcgatggcgaagtacaagagcttcaaccaccaaaagaaattgtgaagggaatcccttctatagatacagctgtttcactagaaacgctaaaagatattaacaacaagctgttaacccgtccagatggatttaatgtctatcctaagcttgagcgcattctaaaacgccgacttgatatgttagaagaaggcggtaaagtagactgggcgctaggtgaaacgttggcatttgcttcaattcttagcgacggaacgccaattcgtattacagggcaggactctcagcgtggaacattcgctcagcgtcatctcgttcttcatgataaagaaacaggcgaaactttttgcccactacatgaattaccagaagctgaatcatcctttgcgattcacaatagtccactttctgaagcatcagtggttggatttgaatacggatataacgtatttgcaccagaaacgctcgttatttgggaagcgcagtatggtgactttgcgaatgccgctcaggtcatttttgatcaattcgtttcggccggtcgagctaaatggggacaaaaatcaggaatggttcttttactaccacatggttacgaaggtcaaggtcctgaacattcaagtggccgagttgaacgcttcttgacattagctgctgaaaataactggacagttgctaatttaacgagtgctgcacaatacttccatattttaagaagacaagcggctattttagagaaacaggaagtgcgtccacttgttattatgacaccaaagagccttcttcgtaatcaacgcacatcatctcctggctttgaatttagtcagggccaattcttgagtgttgttgagcaagcaggacttggtgaaaagaaagataaagtggagcgtattgtcttatgtactggtaaagtagctgtggaccttgcaactgaaattgagtcttctgatgagaagtacgattggctacacgttcttagagtagagcagctttatccattccctgaagaagaagtgaaaaatatatttgaacgctattcaaacgtcaaagaaattatctggttgcaagaggaaccaaaaaatatgggatcttggaattacatttcgcctcgtttgcgggagacggcaccagaaggcgtttctgtaagctatgtaggacgtccggatcgttcaagtcctgctggcggggaaccgaatgtgcataaaaaagatcaagaacgaatcattcaagaagtactagaaccatctaaaactgtttcccatcaaggaggtaatcgtcgtgattgaagttaaagtaccagaactagcagaatccattacagaaggtaccatttctcaatggttaatcaaagtaggcgacaaagttgaaaaaggtgacaacctcgttgagcttgaaacagataaagttaacattgaagtgagtgcagaaaacgatggcgtcatcgaagagcttttgaaagagccgggcgataatgtagaagttggagaaattattgcttatcttggcaatggagaaggtagttcttctaagtcgtcaggtcaagactcttctggaaaagaagaagcaaaaaaagaagagaaagaagcccctgaagaagcaaaatcaaacgatgagtcaaaggcgcatgcaacagaatcttcagaagaagaaaaatctgagaatggacgtacagtagcttcaccatctgcaagaaagcttgcacgtgaactaggcgttgatttgaataatgttgaaacgcgtgatccattaggtcgcgttcgcccagacgatgtgaaggcacatgcagacaaagcaaaccaaaaagaagcgcctaaagaaaagaaacaagaggcacctaagcaacaaaagcaatctcctgaagcgaatgacgggaaaccggtcgagagagttaagatgtctcgtcgtcgtcaaacaattgcgaaacgtcttgttgaagttcagcatactgcagcaatgcttacaacgtttaacgaagtagatatgacggcaattatggaacttcgtaagcgtcgtaaagataagtttcttgaagacaatgatgtgaaacttggctttatgtctttctttacgaaagcagtcgtgggcgcacttaagaaatatccacgtctaaacgctgaaattcaagatactgatattgtactgaagaaattttatgatatcggtatcgccgtaggagcagaagaaggactagtagtaccagtcgttcgtgatgcagacaagctatcttttgcagggattgaacaggaaattggtaatcttgcaaagaaagcacgcgacaataaactaaagcttgatgaactacaaggtggttcatttacgattacaaacggtgggatttttggatcaatgctttcaacaccaattctaaatgcacctcaagttggtatactaggtatgcacaagattcagtggcgacctatggccattgatcaggaacgaatggaaaaccgtccgatgatgtacattgcactctcttatgatcatcgtattgtagacggcggagaagcagttagcttccttgctaaaattaaagaacttcttgaagacccagagcagcttcttcttgaaggataaaacgaaagaacctgaatcagtcgattcaggttcttttttgcatttttaaaaggagaaggtggagcctttatcttatcgctcctgtcatgtaaaatagaaagaaagttgaaaggggtgaaagagttgattcatcaaacatggaaagagacatcgacgattaaaaaggtgaaatgcatacatactgatgcaaagaagtacatggttaaccgcgttttaacagaaggtcaaacttatgaagtgaaaaatgaaacagaagaatttttattcgttttagacaatagtggtaaaatcggtgggttttataaagaatattttgaagaagtagagtgagggtatgaagccagatcaaaattgatctggttttttatttttttaacgcaaaaagggacattggattatatccaatgtcccttgcgtaatttaacaaaattgatcatttttattagggttctttaaaccgaaaattggtcttaaataaagagcaagataggatcctgccagagcaacgatcatccaaacccagccgtggagactaaaggaagcaattccgccaaaataggcacctatattacaaccgaaggctagtctagcaccgtatcccattaggagtcctccaatgatggatgcagctgctaacttaaatggcactctcctcataataaaggcaccgccagcgccagctgctacaaatgcaccaagaataacaccaaagttcatgacgcttgttgaatcagtaagaatcgattgctggagtgcttcacctttcgcacctgaccaatatccccattgtgttacatcgattccaagaaacaaagcgatttttgatccccataaagcaaaagcggatgtaattccccaaggattaccgcgcgatatcaatgtgagggcatttaaaacagctaatgcgattgctgcaatccaaatcggccatgagccacgaaaaattcgcttccatcctgatgttgtaggaagaggtttcatttttggtggctgtcgttttttagcgataaattttacagcgaaaaagataatcccaaacaatgcaagttgcacaatccaggcaccaaaatatcccaatccagtatcttcagctaaggaaatagcttgaaaagaaggcatttgatttacccagaaatcaaagtgccatgcaccgatgacagatccgacgataaaaccgaaaagagtaagtagcatttcagttttcccccaccctactgtatagagcgtacctgaagcgcatccgccgcctagctgcatcccaattccaaataagaatgaaccaaccactacgcttgttccaaccggaaatacatatcccgttggagtcgttccaaataatccaaagccgttagagagaatcggcgcaaacagcgtgctagctaccgccagcatcagcatatgcgactgaattgctgttccatttcctacacttaataattgtctgaaagcagaagtgaaaccaaaccttgcatgcaataaacaatagccaagtaataatcctaagccaaataagacaaattgctgtataccttgatccaccaataatattaatgcgagtagaccaatgaccaaaaagcctcctgttaaaactggcttttgaggagcttttaagaaaggtaactgtaaatttgtttttgaagagtgaacaggttgttccattgccatgtataatgcacctcatcccgatgtatttagtatgaattgatttgtatatcctacatgatttttttatatctgtaaactattacataccaaatcttttcatacctaccattgaaatggacaattctttttctacttgtcgattgtgctataattacacgtgtattaattgagattaattctttcatcaggagcttaagattaggttttaaaaccgtctcaggctatggaggttgagacaatggaaaatgagcaattaatagaaaaagcatttgattttattaatcaagcttatgctgaactaacaatcgaaccatctcgcttagaagagcgtaaaaaggaaattatgcatgaaattaagacaacaggttcctatacacatacatatgacgaactatctcaaggggctaagatggcctggagaaacagcaataagtgtattggtcgcctattctggaatacgatgacagtgttagatgcaaggtatgctacgaaaccaaaagaagtagcgggtgcactactgcaccacattcgcaccgcgacaaacgggggaaaaatcaagccaacaattactatttttcagccaggtaaagttcgcgtttggaatcatcagcttattcgctatgcaggttatgaaacggataaaggtatcattggggacccagattcactcgcttttactaaggaagtcatgaaacttggatgggaaggaaagggaacacaatatgatatacttccgcttgttttctcaatggatggagcttcaccaagtttcattgaaattcctaatgaagacgtactacaggtcgtaatccaacaccctgaatacgattttgctcctttaaatgcccggtggtatggcgtgcccatcatttcagatatgcgattagaaattggaggtattagttatgatgctgcgccatttaatggctggtatatgggcacagaaataggggcaagaaatttagcggatactgaccggtacaatcttttgccggatgtagctaaactcttagaactagatacaagttcaaatgcatctctatggaaagatcgggcattagttgaactaaatcgggctgtcctttattcctatcaaaatgatggggtaagtattgttgatcatcatacagccgcaaaacaatttcaaaaatttgagcaaaatgaagagaaggcggagcgagacgttactggaaattggacatggctaattccacctgtgtcgccagctactactcatatcttccataaaccttacaaaaacaaaattgtaacaccgaactatttttatcaatcaaaaccttattaagcgagggagaaacttggttattgaaaaagcttatttcaccattcatgaaggtcttgaatcgaaatttgaagcgacatttaaagtagctgtactttacattgcagaaacaaaaggatacatgaattatcgcttgttgaaatcagttgaaacagagcgtaaatacgtcattctcattgagtgggagacacttgcctcacacactgaaggctttatgtcatccgatcgatttgataaatttacgtctttagtggatccattccttgaaaatgtagagatggagcatcttgcaccccttcactcagatcaataaacccacatctttgtgggttttttagatgcaaaaaactatacattcgatttaaaaaagggtatgctaggatatagttatattcctataagaaaggttggttttggaatgccttcatctatccctagaccactagttcggttaaatcaatcgtttatttttatatttgctacaggttttgtattcttttcaaattggctttttctcatgatcccactcattgctggattgatgggcttgctactacattttaatccagtgcttaaagtgggaaaacgatttttaaaaaaaccactgaatcaatatattcctgaggatgccgagcaacaaaatttcaatcaaaaaatagcagtatcgcttcttacaatttcttttatagctcacatgttttccattgaatggttagctatcacagctgcagtcctagtagccttagcttcgtttatcgctattctagggttctgtattggttgttttgttcgttttcaatggaagcagtatcaatataaacggtcacagcactcttaaaaggcagcttggctgtcttttttttgactgaaaaacctgaaaagttaatttctgatatacttaagaaagagagaagatgaagattagaaaggataggtttggatgagagagaatatttatgacttaatcggtgtaggaattggaccatttaatttaggattagctgcattgttggatccaataaatgaagtggatgccttattttttgatcagaaacatgaatttgattggcatccaggtatgttaattgaaggaaccagattacaggtacctttcatggcggatttggtcacaatggcggacccaacaaatccatatagttatttaaattatttgaaacaccaaaaccgcttatataacttttatttcttgcaacgacttgaaatgcctcgaaatgaatataaccactattgccaatgggcagcaggtcagttggaaagctgccggtttgggacaaaagtaacgagcattgtacctgtaggagatccagttgaacattatgaagtggttgttgaaaaccttgaatcgcgagaagtgaatacgtactacgctaaaaatatgatactcggtgttggaacagtgccttctttaccttcatcacttcagggtatgaatgaagaagatgtatttcattcatcaacattccttcagcatactaatcgctgtcatgaggcaaaaagcatcactgttattgggtcagggcagagttctgcagaaattttcagggaacttttgaaagatcgaaaagagcatggatattcactacattggatgacacgctcacaagggtttttcccaatggaggaaaccaggttaagtcttgagcatttttcacccgagtatgtcgattatttctatgacctacctcaggatcaaaaagatgacatttttagcggtcaacaacttctctacaaagggattagtcctcatacaattactgacatatataacctgttatatgaacagtctgtaggtggcgaaaagatggatgtcacattaatgccgttaaccgaagtaaacgggatcaaagaaaaagaagacggtactggttatgaattagaatgtcgtcagtggcagaaaaatgaaaagtttcttattgaaagtgaagttgttgttgcgggcactggatatcgtcctttaattcctcactgccttgaagatcttaagcatctaattgagtgggatgaaaagggacgctaccatgtaactaaggattaccgtcttcaattaaagaaagaagcgaattcgaacatctttgtacacagcggcatgcaacatacgcacggagtaggatcaacaaatttaggacttgcagttaatcgaaataaaatcattattaatgagcttttaggaaaagagttttatccgattcttgaaggaaatatttttcaacaatttgaagtgaaagagtagttaaactttctatttatgggtgtaatgatagcgtttgaacctggaattgaaacgggaaaccgttatgaaaatctcccaataacaccagagaatggtgatccccttacgtgggaggaagataccatcacacttttaaatcaagagttaaaacgaagtgatgatatggtaatgaaattggttcaagaattagaagaacttaaaaatcaagttgataatcattagaactaaaaccagcctggcagtgaagggctggtttttgtatgaaattcagaattaatcagaaactaaagacaaaggggtgaaaaatatggagaaaaacgctagaggatatgttcaggagagttgtcaagctctagaagaagcaagtcgttgtttacaacaagctttatcaacagtagagaagggtcagaatcgagatcgaatacagcaatcattagacggactaacagctgttcaatctcattgtagtgaaacggcaaatgtactttcacaacaataaatttttttttgaataaatttgaagaatgtagttttagaagaaataaaatcggaaatggtggactaacgttacacataaggagggataaatcatgagtcttttgtttggcaaaggcatgcaggcattcgaacaagatgcaaaagcagagagagaaaaagtacaaacttctccaattgcacactcgaataaaaaatctagattaaaacagaaaccgactaaattctagccatccttttggatggtttttttattgattattgcttttccccttgaatgaaataaaataattattattcaaacgaatcatacatgatttaaaactgtaaaaaatgattagattatgataagaatgggaaatgtcctcttgtgagtatcagaataatggaggagatttcaaatggttaaacaatggacaactacaacattgcataatgacgtagaaatgccaacgcttggtcttggtgtttggaaaatggagaataacgatgaagtaaaaacagcggtcaatgccgcaattgatgcaggttataaagcgattgatactgctgctgcatacaaaaatgaagaaggtgttggtgctgctattaaagaaagcagtacaccacgtgaagaacttttcattacatcaaaagtatggaatgatgatcagggctatgattcaacccttaaagcatttgaagacacggtttcaaagcttggaattgatacgttagatctttatttaattcattggcctgtagagggcaaatataaagaaacgtggaaagcgatggagaaactctacaaagatggtcgaattcgtgccattggtgtcagcaatttccaccccaatcaccttgaagatttaatgaaagatgcagaaattaagccgatggtaaaccaggtagaatttcatccacttctaaatcaaaaagagcttcgcgagtattgcaaacagcattctattcaactagaagcatggtcgccgcttgctcagggaaaactattggatcatgaagttgtgaaagaaattgcagaacagcacggtaaatctactgctcaagtgatcattcgctgggatcttgaacatgaagtagtgacaattcctaagtcgtcaaatcccgaccgtattaaacaaaactttgatgtttttgattttgaattaacacaagataacattcgcgcgcttgatgagttaaaccagaatgaacgaatgggtcctgatccagacaactttgatttttaagtcgaagccggccatgtgccggttttttgtatgcaaccattccttatttgttacgtctgtattgtgaagggagagaataaaatgaggaaatggctatatggttctgtactacttgtattgatcgtaacttttttctcaggtgtgtggtatacgatgattcgaggatcgagtttagaagcggtgaattctgaagcacctatcgctaagactcaggcagatcgtgagtactatgaatttggtgaaccatacgtcgaagaagatatggatggggaggagctttttcgattagaagttaatgtgttggatcaattgcctgaagaagccaagttaaaagaattagataaaacgcaagagtacattggatttgaactttatgcgaaaaacgatcaagaagctggtctcgatttcaagccttattattcaaaactaaaagtaaatggttcgcaagtagaacctgccgactttgtaataattgaacaagacggttggaacaaattcatgatgaaaagcaaaggttcatttcggcttgtgctcatttatcctgtcgatcgagatgcaaaggaaatgacgcttgtgatttcccctgaattctactataaggatatcttgtataaatggatgaggtagcattttcattaaatttgacaatgttacagaaaggagataaaattatctcgaattcgagatattcaaaaggagagatgagtcaattgcgtatacaacgttttcgtgtaaatcagcagggcgtaggagaatttgatggtggtaaaattacagaacaaaagccaattggctttccaggggaaggatcagaggtaaaacgagttggtcctttattttattgggcatgggctaaagcagagcatgaagggtatatccctctccatccacatcaaggttttgaaatcattacgtatgttattagtggcaaagcagagcacggagactcactaggaactagaagcgtcgtgggagccggtggccttcaagtgatgcaaacaggatcgggtgtttctcatgaggaagggttcgtaggtccagatatgcaagggtttcaaatttggtttgagcctcatttacgagaagcgttgcgacgcaaaccaacgtaccaacagtttgaacatgaagagtttcaaacaatcgttaaagatggagtaaaagtaaaagaaattctaggagatgattcccctgtttcattcgaaacagatgcacttatgtgggatgttttgatagaggacggaattatgtttcaacaatccttaactaaaggacgctcgctcactgttcttgttttagatggtgctggtgaactaaatgagcatgtttatgaagtgaaagatttttttgttattgatggggaagaaagtgttgaaatgatcgttcgagctaaagaaaaaacacggcttttaatgattgaggttccgacatcagtcagttatccattgcttcgaaaataatcctatatgctttttccgatcgatttactggagattaattcctcttgtagtgtacgatagatagtatacatcaattggaagggctggaatcttattatgaaccacttgtatcattcttatataaaaaatgatcggcagaagaaattactagagatggcgaatacgctcgcagattcgttttcagtgagggcggatgaaatcgacaaagaaggtcgttttccttttgagaatttcgaagaattaaagaactccggatatgttgccttaactgttccagcaaagtttggtggaaaagcgattgatttatatgaatttgttatgcttcaagagcgtattgcaacaggagatgctgctaccgcgctctcgattggttggcaccttgggctaatgcttgaaatgagagacgagcaaacgtggtcagatgacgtttttgaacgtcttagtcgtcttattatgaaagaaaatgctttgtttaatcgagccgcttctgagcctgcgacaggaagtccgacccgtggtggaatgccacaaacgaaggcaacagaaaaagatgggaaatggattgttaacggacgaaaatcatttacttcaatggcacctggacttcaatacgcgctcgtttctgcacaaattgaagatacaggtgaaaaaggctttttccttattgatatgaatctgttaggtgtgaaggttgaagaaaaatgggatacgatctcgatgagagggacacggagtgatgatctcgtactagacgatgttctcctaccgaaggatgctttagtggagggtcctcaatctcctgagagtaagctaccaaaagcgtggcttcttcacattcctgcatgttatttaggagttgcaatagctgctcgaaatgaagcgatcgcttttgcatctacgtattctccgaatagcctaccggggcccattaaagaggtacctgaagtgcagcggaaaattggcgaaatggaactagaattgatgcgagcacgagaaatgatgtactccgttgctttaaggtgggtttcggaacctgaaaaaaggtcagaaatgggacctgaattagctgctgttaaacatgttgcgacaaatagtgcagctaatgtagtagatcaggcaatgagaattgttggggctagagcgttatttaaagacaatccaatgcaacgacattatcgagacgtaagagcaggtttacacaatccacctatggatgacgctgttatttcaatgcttgcagggaatgccatcagtcattatgaatcttcctaaggggagatttttttttgagaaaaactgaaaccatctccaattagacgttttttactatctcacctttcaatatgccagcattctaggtcattagatttaaattagtcagaaaaaaaggaaaaaaccattcggatagcgaaatagatcattaagaaacgaaaggaggggagaaaagtgagagaacgtcgaaccgtttctttaagtggaagcttgttgttaacttatccatgggaaatggagcgtaaggagcaagcgttaaaagaacaacgtatctataataggaatagtcaaaaagaacaggagttgaaggagaataaatgattttctttcatgacagtatcttcataaatgaattatagctcagagccgcgcgaaagaaagatcgcttcggctctattttaattgggaaggatgtatgtattattttatcaaaaaaaatgatcggttatggaacgatgttttctagtattcttatcttaagtatgggctgtaaacaaaggaaaggcacaaaaggaaaatggtcatcatctttacatagaatattaagcgatcatcgactcaaaggagcaattgctggggtgagcgttcggtccgcaaaaactggggatttactttttcatcataatggagatacaagactaaccccagcttcaaatatgaagctcattactggagctgctgccctcgaaatgcttggttctgattaccgttttacaactgaggtttgtacagatggcgaaatacacgacggaactttaatcggcaatctttatttaagaggaaagggagaccctactctattaaaagaggactttgatcagtttgttagtcagcttaaatcaattggtgtgaaaaggatcgaaggaaatattgtagcagatgaatcatggtttgatgatcagcatctttctgaagatatgatttggagcgatgagcacgagtattatggagcgcaaatttcagcgcttaccgtttctccaaataccgattacgatgcaggaaccattatggtgactgtttcgggagaggaaatcgggagtgcaccagaagttgtgcttcatcctaaaactagttatgtcgacattgttaatttggcaacgaccgtatcttctgaagaagaaggagaactttttattaaacggaatcatgggtcaaacacgatcattatttcaggtactatttcacagtttggtgatccggaaacgaattggatcgccgtttggaatccagcagcttatgctctggacctttttatcgaatcgctactaacacatcacatcactctatcaggaaaaaaagaatttgcgtctacacctagccatgcaaaaacacttttatccaagaaatcgatgccgctttctgaattactcataccgttcatgaaactaagtaataatggacacgccgaagtacttttaaaagaaatgggtaggctacatttaggaaaaggaagctttgaagcagggttagaagtcgttaagatgtttttgagaggtgaaggattaaatcctaataacatgtgtttaagagacggatccggcatctcgcaaatgaaccttattcaaccaaacgaactttcgaaacttttatatacattacagaccaaggggtggttttcatcgttctttgattcactgccagtagcaggggctccagaacggtacgtaggggggacactacgtgagcggttaagacagacttctgcggaaaatgtaatcttcgctaaaactggttctctaataggggttacctcgttgtccggctatattaaaaggaaagagcctctagttttttcagttattatgaataactttcttgatgaagaggaaatggagaaaatcgaagatgaaatcatgcttattttagcaggtgacgtattgtaatatggctgcgattgcagccttttttaatgtagattataaagaaataagactccgaaaaatggattttacgtcagtttacatgaagactgatataataggtatggatttgataaatagaggcaaagtttggagcgaattgtgattatttcagatatacatagaaataggcatgcagcctaaataaaaagaggacgaaggatgctataccgtggattgtggatagaaagactagaagataggaatagaaagggggatttcatgcttaagcgactctatcagtatcttttatttatatgtgtgattttatctgtatcaacaatctggtatgagtctccctttcaacagcagatcttaattggaacttggattgtcttctttatagattatattgtgtttctttatttatcaaaaagccgatgggactacattaaacgtcatccttttgatttaattgcattgatccctcttgactcaatttttcaaggtgcaaagcttgccagactttatcgattatggcggattaaaaccattgcaaaacgatttagtaaccccattctagggaaagccatgggaatgtcacctcaaacatggtttttaacgagttttgtctttgtaattgtttcgacattcccgttttatttctatgaacctgttgtcgattcttttcaggatgctgcgatatggtcattaggttcaattatatttgttggacgattttccgttgaaccaacttctattattggaaaaatggtgattattctccttacgattgttggcattcttcttcatgctttgatcgttcggacagcttttcgatacgtggattatttacgaaaaaaatggtcatccaaagaagatgaccattcagaagtctagtaaaaccatttaacgataaagaaagttacaagagagagcgtgatggatacgattgtgataatcgccattggtttcagggctttattttttaaatcttttaaactaacgcttaaaccaagacctaccatagcagcggttaaacaccacgtcgtaatctctgtcacaacattcatcgctgaatcagagaagggaataatgggcccgaggagaaatgttcctgcaagactcataatcacaaagccaactaaaaaccatggaaatgcaactttttgttgcgtacccttgtttttgcgtttcataagatacataaataaaaaacatactgggacaaggagaaaaactcttccaagcttggcgagtaagcccattgctaatgcagtttctcctcctggtgctgccgctagagcaacgtgagcgacttcatgtagtgaaattccagaccatactccatattcgcttgatgttagtggaaggaatgggcgaagaatggtgtacccaatggaaaaaatcgttccaaacaaagcaataatgccaacgccgattgctgtatcttcttctttcgcttcaacaatcggcgcaacagctgcaattgcagcagctccgcaaatccctgtacccgcaccaagaagcagcgtaatagacttattagcattcatcactttagaaagccaaacggatgataatagagcaaatgcaataacaagtgctcctagtaatagaatcggtaacccatcttgaagaatcatactaacatttaatttaattccatataaaatgatcgcaaacctaagtagtttttttgatgaaaatgtgatgccttttctaagccattcaggatagccagccatttgtcgataagcgatcgcaattaaaatcgccgaggctagttgtccagtaagcttaaaccctgggaccatggccagaaaataacctaataacgcaataaaaaacgtgaaggcaataccaagaatccagcgtatgggttccggtagggattgctgatgtcttaacgtgttgatcatattctttcctccgtttctccttctatagtttactttacgaattattataagtgaaataattatattgaatggttataataagtgataacttatagcaagaggtgaggaattggatcagcaattaaaagtgtttgttacagtcgtcgataaacgaaatttctcaagagcagctgaagaactacacatgacacagcctgccgttagtcaatatattaaaagcttagaagagagtcttggtactaagttgctggaaagaaacaaccgatccgtagaaatgaacaaagctggtgaaattgtttatcatcatgcaatagagttattaaacttatattcaaaaatgaactatttattggatgacttgacgaaccgagcaagtggtaaactgacaatcggcgcaagttacacttatggtgaatatgttttgccacatgttattgcctcaatacgagaaaagtatcctttaataacaccagctgtcaccattggaaattccagagaaattggagatcttgtttattcccatcagttagatgttggtattatagaaggagactatccagcacgagacatgaaagtagatagtttcacacaggatgaaatggtcattgtagcagccccttcacataagaatgtcggtcatggaagcactctggaaaatgaaatgtggattgtacgtgaagaaggttctggaacgagagaagcgactgagaaaatgtgggaactcctatcgattgtaccttctcaaaaaatggcatttggaagtacgcaactcattaaagagtccgtcgaagctggaattggaataggtatcctatcaaaatggacgattcgaaaagaattaaaactcggaacactaaagattctcgaattgcccaattttagatacacacgaacgttttctatattaatgcgctctccttttcaaacgaaagttcttgaagtctttctcgatcacatccattctcatcataaaacataagtgttcagtagagagttagtgatgagcatgatatagtatagaaattgtaaaagaacgaatggttaaaaggaagcgatagataatgaaagaaatgatagaagaatggcaattagcacttcgtgcggaaatagcccatttaaaaaagtttggaagtaggccaataaaaattgttaacggtcgattattatctggtaatgattttcgatactattttgatgcacgtacacttattcagattccacctggatcaaaaatacgaattgaaatgaaacatataaaacgcgaaggaagaattttatcttcagagggaaaaaatgttattctcgcccttgaaggtgattttggcgatcaaattagagaagctgatctttaccatgatccgtgggaattgcttgatgagctgcacgaacgcctggaagaaataaaaaaaagtaaaagaaggttagcgcgggttagtaaattaatgaatccacctaaaacggttaaacatcctgaagaaaaaattaagagtcatcttcacgagttgattcttaggtcaaaatacaatccagtaacttatgtatggggtccaccaggaactggtaaaacgcataatctggcaagagccgccgcaaaccacttttttaaaggaaatagcgttctaattttatcgcatagtaatcaagctgttgatgttttaatgcgagaaatcgctctttttgctgaaaaaagggagaagtttgaagaaggtaaaatcatgcgctatggccagcaacgtgacgttccatcaatcttgccactatatacagatcagttactaatggcacaacatccggatcttgctgaagagaaagcgagtatagtggaggaacggaagaatttaaaaaaagatttatcaaattcctttagcaatcgtgattcaactcagctgctaaagttagagtctaaattaggaaatgttctagaaaagattcggcgtaaagaaatggaattcgttaaaaacgctacgataataggaactactttaacaaaagcagcgattgatgaaacgatctaccgaaaaagagtcgatgttgtcattattgatgaagctagtatggcgtatgtgccccaggcagcgtttgctgcttcgcttggaaaacgggttgtgatatgtggtgattttaaacagcttccccctattgcgtcagcccggcatccgctagtttcaaagtggttaaaagaagatgtcttccatcgagcaggcatcattgaatcagttgaatcaggtaaccttcaccctcagttgtttcttttaaatgagcagaggcgcatgcatcctgttatttccgcttttaccaacaaaacgatttatcattctctagttaaggattatcccaacactgctgcgttaagagaagttattactgaaaaacttcctttcaaaggaagggcttccgctctcattgatacgagtcatacaggtgcattttgtttcactggccactcgtcaaaatctcggatgaacttatggcaactctttttatcttttcaagcaatttacgaatcattgcaatcaggaatgacatcgattggttatgtcaccccttatcgtgctcagtcgaaactcatgggattattgatagaagatctcctgtcaccgactgaccaagcagatattctttcagcaactgttcatcgatttcagggaagcgaacgagatatgatggtttttgatactgtagatagtgacccagaatttcgtcctggtatgcttcttacaggaaataatagcgagcgtttaatcaacgtagctatgacgcgtacgaaagggaaattcatacatgttagcaacgttgattatttcaaaaagcggatgcctcaatcaaaaacgctcaggcaattagtggagcaccagttacagaaaaacgaaagaattggaccgactcaaataggaaagtggattacacatcattatgctcatctaaaatggagtcatgctttaaacccagaagacgtatttcatgatattaaaaacgcaaatgaaatcatcatttctattccaactggcacatcgctaacaaaagagtggataaaaacgttgaaatctgcaccaggcaaaacaattatcctctcccaaacggtcgttcaagcgattccgttggcacttcatgtggcgtatgacgttccatttccttttgtagccattgatcgtaaagtattctatcttggcatgccatttgaaggaatgaaagatgtccttccaccagcggtttcagtaaggttggaatcagcgcttgttactggtgagatattaaatcaaatccttcccccagacgcttaaaagagaatgcttttgcttttcttcatttgcgttactgtgttaaagttatagagacgaatgaattgaatgaaagctggtgacttatggcgattcaaaagcttgaacatgttggggtacaagtgcgaaatattgaagcatcgaaagggttttatcaaggtatgattggactcgaactttttgatgaatttgatcatccggatggcgataaaaaactcgcttttcttggttttaacgatgaaattttagtagagttaatagaaggctatgattcagatttacctacggaaggtaaagttcaccatatcgcctttactgtagaaaatatcgaacaagagcgcacccgactttatgaccttggtgtaacgtttattgatgaaggcatcaacacattaccaaacggagcaaagtaccttttcttcgcaggacctgacggcgaatggcttgaattttttgaacctgcatctaaatatagcaagtaaactctaaaaggcagtgtccccggtgaaagggcactgtttttttgttcaagagctccaattctttcgtttctgaccgctcgtcttcgcttttcttgtctagctacgactcgcagaaacgcctgaatttcactctttcacaaaacacaaaaagcgtgtttggttcaagagctccaattctttcgtttctgaccgctcgtcttcgcttttcttgtcatgagctggaaactcttaaaaagggtggttgtgttgtaagattgaagagaacaaaagtcatagaaagaaggaatcgttatggccaaacagcaagatcttcagaaagagaagatctggacgcgtgattttatttttatttgcatggcaaacttttttatttttgcaggattccagatgaccttaccgacactacctttgtttgtgaatgaacttggcggcagtgatcagctaataggttttgtggtcggtatctttaccttatccgctttacttattcgaccatggagcgggcacgtattggaatcgcttggaagaagaatcattttcttaattggattattggtttttgtcatatcggttggatcttatgcgtttactggcagtcttgttcttttatttctaatgcgggtagtccagggactcgggtggggtatgtccacaacggcggtaggcacaatcgcaacagatttaattccgcaaaagcgaaggggagaaggaatgggatattttggccttgcaggaaatttagcaatggcttttggcccagctcttggtttattcctaatcgctctttctggttttaaaacaatgtttttgattgcagcctctgccggtttgctttcattcatcatcgcttcgattattcgttataagcctgcgaataaaacaccgattgagaaaaagaaatgggacatctttgagaaaacagcattaatgccttcgatattacttttcttcattacaatggtctttggaggaatcgctacttttctaccgttgtatgccgaacagttaggtattaatggaattgaatggtactttgtcgtgtttgctgtatcgcttatgcttgtgcgtgctttcgcaggacgagtctatgatcggaagggccataaagctatttttcttccaggcgccttcttaattctagcggcaatgattgatcttacgttattagcgaatcaatttatgctcattcttgcagctgtattatttggaattggatttggctctgtgcaaccagctcttcaagcatgggcagttaatgaagcaccacttcaccgaaaaggaatggctaatgctacctttttctcgttttttgatttaggagtaggtctaggggcaatgtttttcggtttgatagcttccacatttggctatgctgatatttatttaacagcaggtatatccgttctcatttcaatggtgatttacgttatatatttaaaaagaagtgctgcggtacaaagacatcatgaagctgttcaatggaaatagaaaaatgagctcgtaagccgagctcatttctttattatcggctactcggaatgagcatctccttgttcacttcatttagatcgcgacaccctgataacgccatcgttaaatcgaaatcagcaagaaggttagatagtacatgctttacgcctacttgcccggctacagctaatccgtacatacatggtcttcctacaagaacggctttggctccaagggcaattgctttaaatacatcagcacctcttctaattccactatccatcaaaacaggaacttgattttcaacagcttccacgatggccggcagagcatcgagtgctgtgatcgcgccgtccacctgacgccccccatggtttgagacaataatcccgtcagctccatattttaaagctagctttgcatcatcgggatgaaggacgccttttaatataatgggcaaagacgtatattttcttagctctgctaaatcctcccacgttagtccggcattcccaaaaacgtgagtccaatgcataattgccccgatagcgtcatcttcaggaggtacatggagcccagcgcgaaaagcaggatccgttaaatagttaccaattccttctccaatcagaaaaggcaagtacacattctttagatccaattcacgccatgccatcataggagtgtcaagcgttacgacgatcgctgagtatccagcgagttccgctcgttgaacaaaacttttagcaatctctggatctcgactccagtaaagttggaaccacttaggtgcttctcccattatttcagcaatttcttccatagaatggcttgatgcagagcttgcaatgtaggggattcccattgaagcagcggctttcgctgaagcaagttcgccttcttgatggataatggattgcacaccaattggagcaactaacaatggagccggaagcatctgaccgtacaagcctacctttaagtttcggtcttccacatgacgaaagacgcgaggcacgatattccatcgcttaaatgcttcacggttcgcatttttcgtttcttctgcaccagaacctccagcaacataatcataaggtccatcctcaaggatttcacgtgcgcgtgcttcccaatcttcatacctagttggtaaacgatccggatcaggtgaatgcatttgtttgtatataccaaactgaatttcattgccgatattagtcattagaacgcctcctttatgaatgtagttagttgaatcttctttgcattctatccatttccttctttaaaaggaaaactttatttttagataaggagagaatagcaggattttgtatgttagtttcgaaatagtagaatggcactaaattcgttactaaagaacatattgggggacaatcatgaagctttcggtcatacatacgaacgatattcatagccattttgacaatttcgctaaagcaacatcacttattcgggattatgcagatgaacatacactagtgttagatggtggggactttgctgactttaaaagtatcgagcttcagggaacaagagggattggtgcagtgaagatgttggaatcgaccggttacgacgcgattacgataggaaataatgaactatttaatggaaatgatacattagagcatatggcgcttcagagtactgtaccatttattagttgtaatcttcttaaagctaatggtgaatcgttcaatggagtatgcagcagtaaaattctaattaaaaatgaacttcgaattttggttacgggtgcttctccagatttacaagagttcaatgatttgatgggctttcaaattttagattatgtagaagcgatcagagcagaaatcaagaagcaacatggaaactatgatgtttgtattgtgttaaaccatgttggtacacaagcagatatcgaattagctgaagccatcgacgaaatcgatttgattttatccgcacatgaccacgtcctttatgaggaagcaaaaatagtgaataatacgatactaaattcagctggtatgtacggtgaacatattggaattattgaagttgaagtatcagatgaaggcatagaactactagcttcttctaccatatcaacagctaaagcggttgaagatgaagaaattcaaaatatattgcaagtaagtagggaagaagcgatcgctcacctaagtaaaccgctttataatgttagcaaaccattatggcatgacgtacttgaagagaacccgatgaccaatttaattgcagatgggttgaaagaccgttttgattgtgatcttgggctaataaacagcggaattgcaaatgggggtctggtcgactatgtttccaataaaaagctaattgaaatttgtccatctccactaaatcccacttactttgaaattcaaggaaaagacctttacgcagctcttgaaagttcattaaatagctcggtttgtatggctgatggaaaaggacctggttttcgagggaagtatgtaggacggcttcacgtatctggtgcaaaaattcaacataatcaaaatcgaattaagatgattacaattaaagatgacgctttcgatcccgagcggtggtatcgcgtagcttcatcagattacttgctaagaggttctgggtatccagagctagcaaacaatcgaaactttcattatcaaccagatgaaataaaagatgttattagagaatacgccgagaaggaagatttcgttacagatgctttcaagaagcgttgggtgtagactgtttccgtcttaagtcggagtatttgttcgtactctagccgttttcagaaaaagaaaattgatcttaaactaatagtagtctacatagaaaggaagaagataaatgcgcgacgaacgattaagtcagttagctaagacgctagtccaccactccattgaagtaaagattggtgaacgcgtaatggtgacaggtcatcaaattgccaaaccgttaatacgtgaaatcattaaggagatttatgcagcagacggggtgccatttgttgaattacgtgatgatgaaatagacgttcacttggctgaatttgcaacaaaagagcaagcagagattcaaaaagaatggtatgcgaaacaactagaagatgttcaatcctttattcacattcgagctgaagaaaatgatgcgacattgtcagagcttgcctctgatgccatgaaactgtatggagaagttttcaaagagatcgatcataaaatggtgaatgaaagaaagtgggtacttcttgattatccaacgccagcagcagcacaaaaagcaaaaatgggaacacttacttatcaggattatttgtttgaagtgtgtagtcttgattataaacaaatggcggaaaagcagaagccgctttttgatttaatggaaaagactgatcgtgttcggatcgttgcacctggtacggatctctcattttctattttgaatatcccaaccatcgctagccacggaaagaaaaacattcctgatggagaagtgtttacatcacctgtacgtgagagtgtaaatggaattatttcttttaatacaccttgctcgtatcgagggattacctttcacaacgtaaaattaacattggagaaaggtaaaattgttcatgctgaagctgaccaaacagacaaactgaacgaaatcctaaatcttgatgaaggagcacgctatattggggaatttgctatcggattaaatccactaattaatcatccagtagggaataccttatttgatgagaaaataaatggtagtatccactttacacctggacaagcttatgatgatgcagacaatggaaatcgctcaataattcactgggatatggttttgattttacgggaggagtatggtgggggagaactgtatttcgatgatcaactcattcaaaaaaatggggtttttgtgacagatgagctgattgatttaaacccagaaaatcttaatcaaaaagaagcagtacgctaatcagcaaccacaggcagagtgatgcttgtggttttttattataattaagtacaattaatgtattgagacccaatcaaacataaattattttgggaatattggggttagacaatctaattattttagacctaatcgtgcacattaacgaaaatcagaaaaaaagatggagataataaatttcaattaccgtattaaactaataaatataattacatctataaagaaatatctcaaaagataaactaattcaagagaaaaagcaggccaattcggcctgcttttcattaacctttatatgtcttaccgatatactgaacaattttacgtaactcagtaactgttggacgaccaaaaggacttgtctgtctttgctgataaagaagttcacctttctcgtcaattaagaagtacgctggctcaccatgagcaccatgatcttcataaggatcatcttcacggtgatagtgaacatcatatgctttaagcgccttgtactcctcatctgcgagtaccggaaaagagaggttcttttcttccgccattgcttttagatcttcaaatttatcagtggaaatggtggtaatgtgaacatttttaccttcgaagaagccagtgctttcttcaagattttcaagatcactcacacagacaggacaccaagaacctctaaagaaaagaaaaaggtgccctccacctttttcttttctatatgattcaaaagaatactcttcgccatttactgatggaagtgtgaaatctggtactgcgtctttcaatgcaaatttagacaaaatttcctactttgaatagatacaatcgccttatcatgtaaggcaattcttatcatatcctaaatcgagaacgaatgatgtaagataccttactcctttttaatacaaaataattgacaaaaatagaaaaaacaaaccaaaatttacttttcaagttcattacgaacgaatgacacaatatgcacttaaacaaaactaagtgcttctattttcacacaatgatacaaaacatatattgtgtatcattatgaaaatcaatgaaagcttaattttaggggtttttctcttttcgtggagaagctagaaaggtataatgatacatataattaaactatttatcattaatgatacataacggatagagaaaggaggctgccttcatgaacacggttcagccgattcgcgatcctcagaagataaaattagtaaaacaaaacctaagaaagcgaaattccagagattggtttttgtttaacatgggaattaatactgggctacgcattagtgatttgcttcctttacgtgttggtgacgttcggaatcaaacgcatatcatcataaaagaaaaaaagaccggaaaatcaaaacgttttccgatcaactatgcacttaaggagcttatcgagtcgtatacgtttgatatggaagaaggagattttttgtttccgtcaaacaaaacagatttacctattcaaagaggtcaggcttacaagattctaaatcaggctgctgcagaagcagggctttctgaaataggaacgcatacgatgcgaaagacatttggttacttttactacaaacaaacgaaagatgtggcgatgcttcaaaagatctttggccattcagcaccatctattaccttaagatacatcggaatagagcaagagcaaatggatgaatcactgtttaattttagtttgtaaaaaacgtccaaataggaacatgttatactttttttgagaggaggggaattaagctcattaaaagcagattagcgttaacgatttaataggttactatactaatgaagaaacacggatgaagatcttattttggttccgcttacaattaaaaggaggttatgtcattgggaaaaaaaaatcatcgagatccaacagaagcatccatacatacagattttaaaaacaatatgacgtacggagaatatttaagccttgataaaatacttgaggggcagaataggctatcagaccatcatgatgaaatgctttttatcattattcaccaggtaagcgaattatggatgaaattaatcttgcatgaactaaaaggggcaattgaagcaatcgaaaacgatgaattatcaactgcttttaaaatgcttgcgcgggtttcgaaaacacagacccaaatcattcaggcatgggacgttctctcaacgttaaccccttcggaatacatgcagttccgtgattcgcttggacaggcttctggttttcaatcttatcaataccgcatgattgagtttgcattaggctataaaacacctcacgtgttaaaaatttatgagaaagataaagatcttcatgaggaattaaaagacgcttatgaggaaccaggcatttatgatgtagcgattaaagctctatcgagggcgggattacctattgataaggaaattcttgatcgcgatgtgaccgaaacatacggcaagaatgactcagtcatgcaggcatggctgaccgtatatcgagatgtagaaacgtattgggacctttatgaactagctgagaagcttgttgatattgaagattggctacagcaatggcgtttccgtcatatgaaaacagttgagaggatcattgggtttaaacaggggactggaggctcatcgggcgttggttatttgaaaaaagtactggaccatcgctttttccctgaactttgggacattagaacagagctttaatataacgtaatattattatgtaaactactactaaaaaatgcccttaaaagagggcatttttttatactaatacgtcctttaacgtgtgatcactttctaggaaagagagtgccttttgttggaaggtaggatcatggaggtaagtataccgatgtggtttaactgatggagcttttaaaatcgcttctgccagatcggatttttgaatcccttcctcttttacataatgaaagaaacccgttcgctcaaatacttttctcattcgtaaggctcgatgattttgtacgttcgccatgatgtatgtagcaagaccaacttgaataccgtgcatatagggttttggcaaatgtttgtcgagagcatgtgaaattaagtgttctgagccacttataggggcactattaccgctaatcactgtagccacaccgcccattgtcaacgagcttacgagttccttaataaatatggggttttgaagatcagtcatcggcgttcgaatgaagctattgaccgcttttttactaagcatcgctgcgaaagcattgacatgtcctttaccatgcctttcttcaaattcccaatcatacagagccgtaatgttactcattaagtcacctactcctgcaagtaagaagtgcgaaggagcctgttgaatcacttcaagatctgcaataatgccaaatggcacctgtgcaggaacggttgtctttttttgattaatgattaaagaacaattgctgctagcaaaaccatcattggaagcagatgttggcatgctgataaaggggagttttctagaaaatgcaatatactttccgtagtcaataatcataccgccccccatagcaacgacaacatcataggaatctagcgtaaaagcaaatgcaatgagatcctgaatggtttgaccgggttccattttttgaacgtttatcgtcacttgtgtcatcgatttctgaaaggactcggcataagcatcgtaagtaaacgcatcaaacaaaaacagagcatgatgaaacccgtgtttatgaagaataggatctagttgatgacggatacctgaacgaatctccaaaatggaaggaatcgtaatattcgttaatgcatgcatgcttaaagagttcctttctcacgcaaaaattcttctatctgcaaaaacgaatcaaccgcaacataaggcacattattttcctttaataaatcttgaagtgcatctttagcaaaagtaagatcagcaactttcgcaggatgcgaatcgggttcgctatcaccagcaaaatatacaacatcatacgtttcctttagttctgcaattactttcgatttatcaatgccgtaacgcctagaataatgtttatgattttcatcaatcgacaaatggacatttttatcttcataatatcctttatttgagaataccggtacgtctttaatcccataatgctcgagaatgtgatgaatgtaataatcggtgccggcacttagtatatagaaatccccaccgctttcctgaaccgttcgaatgaaagagggaacgtgctcatcgataggtaacgagagaatgtcttgaataatttgctcttcatgctggtcaatcgattgaaatacttggctaagaaaatcaatatcctgcatttcaccagctttccatttcttatacaatggtttaccttcaggatagtaagtgtcaatcacaagccagtagaaatccttttttgaaatcgttccgtcaaaatctgacacaaaagcccactttttcatttatgtttcctcctcgtttgatgggtgatctcttaaaattgtagcacgcttttggattcaaaagaaattcaattcttttagaacaataacgtacaacagcgttaaattgtgttaaaatgatttttaaaaagttaaacaattcaatttaatctgaaggagtgcgagaatgagtaaaacaatcagcaaagtccaggtggaagatatcattatcgcaaaccaggttttaaaagaagtcgttgttcatacaccgttacagcgaaatgaaatactctccgatcgctataactgcaacgtttatttgaaaagggaagatttgcaaaacgtccgttcttttaaaattagaggtgcatataaccttattcaaagcttaacaatggaagagaaggaaaacgggatcgtatgcgctagtgctggaaaccatgcgcaaggtgtcgctttctcatgtaagacgctcggcatccagggtcacatctttatgcccgctaccacgccaagacaaaagatttcacaagttgaattatttggaggctcctacgttgaagtgattttaacaggagatacgtttgatgattccttccatacagctaaagagttttgtaacaaacaagacaaaacatttattcatccatttgatgattaccgaacgattgcaggtcagggaaccgttggcctcgaaattatgaatgacattgatgaagttgactacgtgatgcttggcattggcggaggtggacttgcttctggtgtcggatcgtatattaaaagcattagtccggatacgaaaattgttggaattgaacctgaaggcgctgcggggatgaagcgttcgattgaacacgacagcgtagtaccacttgactttattgataaatttgtagacggagctgcggtgaagcaagtagggaaactcacgcttgacatttgcaagcaccttcttgatgatgttgttcttgtgccagaagggaaaatttgcacaactattttggaactatacaatcagaatgcgattgtagctgaacctgcaggtgctttatcgatcgcttcactcgatttctataaagatcaaattaaaggaaaaaacgttgtttgtgtcattagtggggggaataatgatattaaccgaatgcaggaaattcaggaacgctccttgatttacgaagggttaaaacactatttcattgtccattttccacagcgggctggcgccttaaaagaatttatggcggatgtattagggccaactgacgatattacccgcttcgaatatacaaaaaagaacaaccgagatcgaggaccagttttagcaggcattgaacttaagcataaacaagattatgaacctttaattgagcgtttaaatcgaaaagggttttcttatattgaaattaataaagatcaggacctctttaacctgcttatctaaaacgcctataatgggcgtttttcttcgtcagggctttctagtataaatgagacacttctttctatatgataggaagagattttattaataagaggtgcataatgaaactaagtatacttgaccaatcacccattttttatggagagacggaaggggatgctcttcaatcttcaaaagaaatagctgttctcgcagatcgtcttggctatacacgatactgggtgacagaacatcacgatttagcgcatgtagcttgtcctgcacctgaagtgctcttaagctatattggcgcacacacagaggaaatccgccttggtgctggagcgattctccttccgcactatcaaccatataaagtcgctgaagtttttcatacgcttgcgacgctatttccaggtcgtattgaccttggtctaggaagagcaccaggtggatctgccgaagcaacaacggctctctccccacgattcctcgaagaagttaggaagatgccggaaaaagtggaagagttacttcgctttcttaatcatgattttccgaaagaccatatgttccataaccttcaagcaaaacctgttccgaaccatcggcctgaaccctggttacttggaacagggaagaaaagcgcattacttgctgcagaacataacatgtcctatgcttttggttattttatgagtgatcacgatggaaaggaacttttcaacacgtatcgaacaaattttgttggcgaaaggccttatacaattttagcggtttccgttatttgtagcgaaaccgcagcacgagcagatgaacttgcccattggacacacgttgttaatgaagctcgtacaaaaggggaaacagctcacatatccgttgaagaggcgaaacacgtttctcttcctgctaacacgaagctcattagcggaacatttgagactgtaaagcagaagctaatgactcttcaggaagaatatgaaccagatgagctaatgattacgacgataacgcctaatcgtgatgaaagactgacttcttttcagcttctaggtgaagccatacgaaaagaatagatgttttttcactaataccaataaatctgttatgatagagtttggtttcttttgttttttataacacacgttacgaactgtcagcatttgaacagtaccaatagataagaaaataaaaggacggatcacgctagaagaggagaccgtacatgactcaatcactacctttcgaaattaccaaagaagattctttttacgagaaacttggagactatgttggcgatgtattttatgacattttacctgaacatggttacgagcttcgcgatgaacagatcttcatggcttttcaaattgaacaagcctttaagaataagagcgtcgtttttgccgaagcaggtgtagggacaggaaaaacgtttgtttatttgctatacgcgatttgctatgcacgttatactcgaaaaccagctattatttcctgtgcggatgaaacgcttattgagcagctcgtaaaagaaggcggagacattgagaagcttgagaaagctcttgggttaaccgtagatgttcgcctcgctaaagcaagagaacagtatgtttgtgtaaaaaaactagattacctttcacatcgaacagatgatgaggatattctgagcgttcacgatgaaattccagagtttgtctatgaacctgctgcgtcgatgaaatcattccatcgatatggcgatcgcaaagaatacccatgggtaccaaatgataagtgggaaaaaattgcctgggatccgttacaacagtgttcaacttgtgattggcgccatcgatgtggacaaacattaaatcgtgaatactatcgacatgcaagtgatttaatcatttgttctcatgatttttatatggaacatatttggacgaaagaatctcgcaaacgtgaaggacaacttccattgcttcctgaagcaagtacggttgtttttgatgagggacacctccttgaattttcagcgcaaaaaggattaacttatcgctttcactctgagaccctctcaagtatcctgacaggatatatggaccaggatgtacgggaagaatctctcacacttgtcgaagagattctagagcttcatgataactggtttgctcatctcagtgactcagcaatagccgtagaaggttccgttcgtaaggatgtacctcgaacagaaacaatgattgaaatcgcaaaagccattgctgagaaggttgatgcgttattggaacagcttgtttttgattctgagctttatgtgatggaagattatcacgtcaagatcatggaagaatatctcgaatttttcgcttatggattaagaacgttacttcaggatggagaagggattcactggcttgaggaaacagagacacaaacgtcgcttgttattatgccaagacttgtagaagacattttaagaaaagaagtattttcacaaaaaattccttttgtcttttcatctgcaacattatctcaggcaggggatttctcttatatagcaagcagtcttggtatacaaaaatacgcctcattttctgtgaattctccatttgattatgagacacaaatgaagatgaatggaactgtttctcaatctgagaaagagaaatgggaagaaatgggccgtgcactcaaccataacaaaggccattctttattgctattttcatcacttgaagaaatgaaccgattccgcaactgggccgatcaaaaaagctggaatttcacaatcatctatgaaggtgatcgtgaaatcagtgaaacagtaaaagcttttcagcgagagcattcttccgttttatgctcgtatcatctttgggaaggacttgatgtacctggtgaatcgcttacacaggtacttatttcatccttgccatttccaccaaacgacccggtatttcaggcgaagcgaagtcactcagaaaatccagtaaacgaagtggatcttccttatatgttgctacgcttacgacagggaattggtcgattaattcgaagcagtgcggatcatggtactgtacggatttggatgacagaagatcaagtcaccacatatgaaaagcaagttcaagaagttttaccattaccaattaactggaattgattcaaaagctctttctccaacgagaaagagcttttttcattaggagttggtatgataggtggaggagggatagaatgaaaacaaattgggaaagacatcaagcgatcattcatcttccagatgaagccattacatcaataatgaaaagctatcatccgcatgcgagcattacatcaacgagttacctttcagagggcttaagtcacacaaatttgaaagtcgttattgcaaatgaaaagtctgtagttatccgaatagcaagagattctgagagtttattacgtgaaaaagaaatccaccacattcttcctacacgtgtacaaagacccgattttctgcacttgactaaatggaatgggtatagtattggacttttagaatggaagaaaggtgtgttactacgagatcagctgacgaattcttcagcacgcgagataggagaaatggggaaatcaataggtgagcagcttggctgtattcgcgaaaagcgttttactacatatggatttctagacccgaaccttgatatcatggaagaattccgtttaactcctcagtcattcatcaccacaatcgaatcgtttttcaaccactatgcttctaaatggttaccggaacatatgcctgagaaaatcatcgaatttgcaaaggaaaatgcgcctttacttaaagaagatcagagtggagctggacttgttcatggtgattttaatggattgaacatcttaatgacaggaacggaagtagatgccgttctggattgggaatttgcattatcagggagtatttattttgacatagggaacttgcttcggtatgaattcaagcatatcgactcatttgaacaaggtttatctgagggtttaaagaataaaggaatttccctaccggagcaatggaaaaagctcgcgaagcttgctgatcttgttgcgctatgtagcttgcttgacagagttgtgtgcggagaaaatagagtaaaagatattacgcgccttatcaatcagacgctacacacagaatagttaaagagagagggaaaagacatgagaataggttttattcgccacgggagtacatcatggaataaagaaaagcgggctcaaggaagctcggatattcaccttgatgaacaaggtcgccgtgatgcagctaagctaggtgagtcactcttaaatgaagagtgggatatgatcgtttcaagtgatctatcacgtgcaaaagaaacagctgaaatcatcgggcggtttcttaatattgatgttaaaacggatccaagactgcgggaagctggcggaggacaaattgaaggtacaacggagcaagagcgaattgaaaaatggggagacaactggcgtgagttagatctcggcatcgaaaaagaagaactcgttgtggcaagagcgcatgaagcaataaatgacttacaccaacaatatccaggtcaaaatattcttatcgttagtcacggatcgtttcttcggcatttctttaaaagcacactacctgaactgaatcatgaaaagcatattgtgaacacatctttaacggttttgagaagaaaaggagacgagtggttaaatgaactttatcactcaacaaagcacctcgactaagatgtaaagttgtctttagctccattatgcatttttaaaaggatattcgattagcatcaagaagtctttcagtatgtaaatgcaacttatttaatggagggaatgaacgatgaagcaatttcctaaacgtatagcagaagatttatctcttatcgatctctacgacctgtctctcgtacagcggacaggttgttatgtcctgcatgaagaagaactaaccattattgaaacaagtgcaagtccttcgatttcacacttaattagcgggctagaaaaattacatatcgacctgaatgaagtgcgtcatatcattgtgacgcacattcatcttgatcacgggggcggggcaggactgctgatcgaaaaatgtccaaacgcccgtgttctcgtacattcaaagggagcacggcatttagaaaatccaactcgcttaattcagggcgctaaagcagtttatggcgaacggtttaaggagctatttgaaccgattctaccaataccagaagaccgcttagtgattttgaaggattacgataaaatcaagattggtcagaatcgcacattaacatttatcgatacacctggacatgcgaaacaccatttttccatacatgattccaaaacgaacggcatgtttgttggggacacagtaggggtttattatccacaactcgatgtcgaactatatttaccctcaacctcaccaaatcaatttgatccagatgatatgttagcatctgctaataaaatcatgtcattccatcctagtctcatttactttgggcactatagtcagtctaacaaccctgatgaagtcattcggcaactaacatcgtggctatctgtgtttttgaaaataacggaagaagtaacaagtcaagaacagaagaatgataagcgatcagaacaccttttcaaagcgcttctaagtaacgtccaaggcgctttattcaaacaaggcgtgcctcttaatcatcccgtttatcaatacatcaagatggacttacacgtgtcggcacttggcctattggattacgctgatcgcaataaagtaagaaccacttagggggatcttaagtggttttcttatggatactaagcaaaaccatttattccatgatatagtggacaaatctacagaccaacgtgtggagaggtgctatgttaaaaaccaaatcaacgattcaatcttttcgttatatttttatcacgtatgtaggaaccatcaacttatttgcactcctttatttgctgcctttttcgcattacgggtcgctacaagcggttgattcgctttttatctcaacaagtgctcttagcgtaacgggtttatcttcagtgaatatttcgacagacttcactcgaattggacaggcattattgattattgaaatgcagttaggaggcattggaatactggttcttgtcagctatctttttcttatgatgggaaagaagcttacgatgtccagcatgcttttaatttctaaagaccaaaatcaatcgcagctaaaaacaatacgttcattaagtttgtcggtattaatgatcgcgttaacagtcgaagccattggatttagtctcatgttcaatgcgattagtgaacaatataactccgtaaaagaagcagtctttgttaccgtttttcacagcgttgcaagctttacgaatgcaggatttgatttgtttggagatagcttaatttcttatcagcacaattggctattacttttgacgtcagctacaatgattttccttggtagtcttggatttcccaccatcgtcgaatacatattaggctttcgtaaaaagaaaagtttatttacaaaagtgaatattagacttcatagttcactctttctcattggacttatggtgtatttctttttagagtataacggcgtatttaaccatttatctttatgggataagttcgtaaatgtggttttcctttcagccacctcccgaaacggagggttaacgactgtcgacatttcaacgcttgatataacgactgtccttattttaatgagtttgatgtttataggtggatcttcttctagtacaggaggaggactgcgcttaactacttttgcagtacttctcgcaaagatggtatctgtcgcaaagtcggaagaatacaccactttatttaaaaaaacgatttctcaggattccattaataaatcctttcttatctttttaagcttcatctttttatttgggttttcgaccattgtactttcctattttgaatcgcaggaaatccttttggtggcttttgaagtcatttctgcattaacgaataccggattatcaatgggcatcactggtgaacttacaggggtatcaaagctattattatgcatgcttatgattattgggcgcattggcgtatttagcttcatttacgctgtatttaaaatcgaaaaatctagaacacgttacatcaaagaagacctggctgttggataaaaggagtgaggaacgatgcgtaaacaatttttagtaatcggtgcaggaaggtttgcaaaaggcatcatccgtgagctatatgagcaaaaatgtgatgttgtcgtgtgtgataaagatgaaggaccattagaagatattgacgattatacgactcattctattgtcggagatttacgtgaaaaccgcgtgatggatgatcttaatgttgagcaatatgacgccgtttttgtcgcgatcggtacggacgcctattcagcgattttaattacgaacagacttcgtgatcgaaaggcaaaaaaaattattacaaaagccgttagtcgcgaaattggtgaaattttatctaacttaggagcagatcaggtcatttatcctgaagaagaagcagggatgaaagtagcgaaacaaattatgatgccaaatgtgctcgagtatatcgaaatcacaaaaaacgtatctgctattgaagtcgaggtcccagaagaactggtcggaaaaacgcttctagaactcgatttttctagaaaatatgagttgaacgtttccctaatcttgcggaaggaagcacctattttgagtcgctatgcagaagtcgctttccaaaaaggggatgtcatcttaatggttggagaaaataaaaaaatcgagcgctttaaacacaaattttcaatctaaagttactcaatagaaaatgaaaaaatccgcatagttttgcggattttttcatgaaaatacaaaaaaataaaaaaacatttgaatgcgttttcattgttgtcttttcagtacacacagcttacttttgcttgaaaatcaggtgtcataaaagatgacaagaataaaatttcttgtttataataagtttattgaaatatttttaatatttggtattaagtttttattagaaaggttgatcggacatgacaattgatacggcacattcaacgcaacaaagtcaccacgttgccctaaggcgtgacattaacatgctaggaagccttctcggtgacgttttagtgcagcatggcggcaaagaacttcttgatatggttgaatcgattcgtgagaagacaaaatccctcagaacagctgcagatctcgaaacttctcagcagctgaaggaaaccattcagacgcttcaaccacctatgagaaagcaagtcattcgcgcatttgctctttattttcaccttgtaaatattgcagagcaaaatcatcgcattcgaagacgcagagattatcaaatgttggaagaagagcaatctcagcctggatccattccgcacgcaatctctttacttaagaagaataatataccaggtgagctgattgaagatacgttatcctctctatcactcgaactgattttaactgcgcatccaactgaagcaacaagacgctctgtcctagaaattcataaacgtattgcgaaatcattacaacaattagataatccgctattaacaaaacgagaacaaaaagcattaagagcggatctacttaatgagattacaatcctttggcaaactgatgaattacgacataaaaagccttctgttatggatgaggtaaatatgggccttttctattttgaagaaacgctattcgaagtactaccacaaatccatcaagaactagaggagtgtttgaaggaacattatccagatgcgaaatgggaagtgccgaatattctaaaatttggctcgtggatcggtggagatcgagatgggaatccatttgtcacaccagaagttacctggaatacgcttcaacgacagcgggatgttgtcatttctaaatacaaagaatcagtaaaagacttaatgagacagttaagtcagtcaacaaaccgcattgcaatctgtagcgaattaattcaatccattaaagaggatcaacaacgtcttccaaacacaaaagaatggggcgtttctcacgaggcttatcgggttaaacttgcatacgttttagaaaaactaaatcaagtggacgacgagaacggatacaaaaatgcagaagaatttatagaagatttaaagctaataggcaatagtctccgtcagcattttcctgaaggagcgcacttctcagaattaaataaactaattcgccaggcatcacttttcggttttcaccttgctactttagatgttcgtaatcatagtggtgaacatgagggagccatcgcagaaattttaaaacgtgttaatatggcaaacgactatgcatccctaaacgaagaagagaaagtacacttgctcagtagcattttagaagacccacgtcctgttttatcaacttatgaagactattctgaaaaaacacgtaaaatactcgatattttttcgatgattaaaaaagctcatcaggagtttggtcctaaatcaatttctgtgtatttaatcagcatgacgcagtctgcaagtgatcttcttgaagtcctcgtgcttgcgaaggaagcaaacatttaccgtttacatgcagatggtagtgtagagagtgatttaaatatcgctccgctacttgaaacaatcgatgaccttaaagctgggccatccattatggagaagctttttgaactgccggtttataaaaatcacttagaacaagtcaataatcgccaggaaattatgctcgggtattcagatggaagtaaggatggaggaacactgacggctaactggaagctctatcaggcgcagcaagaaattagcagtattgcatctgaacgcggcttaagtctgaaatttttccatggacgcgggggtgcacttggtcgcgggggtggtccacttcgcagaagtcttttgtcacaaccgccagaaacgtatacagctggagtcaaaattacagagcagggcgaagttctctcttctcgttatttactttacgatatcgcttatcgaagtctagaacaggcgactacgacgttactaacgtctgccgtttctggaattgaaaaagatactcgtcaagaaaaatggcataaaatgatggaggaaatgtcttcaatatctcttaaatcctaccaatcgcttgtatttgaggataacggattccttgcttatttcaaacaaggaacgccgcttcctgaacttggcgcattaaacattggttcacgccctatgagtagaaaaggaacggatcattttgatgatttacgcgcgattccatgggtatttgcatggacacaaagccgccaactcatgccagcatggtacgcttcaggcattggactcacgaaattcgcgtcaacggaagaaggcttaaagaacttaaaagaaatgtatgagaattggccattcttcgcatctctaattgataatttacaaatggggctaatgaaagcagacctcgcaacagcagagaaatatatgtctctaatcgatgatgaacagcttgcgaaccgcatttttggtaaaattgttgatgaataccatcgtacgaaagatgtgattttgaccattactggacaagaagagcttctagatggtacgccaaatattaaagattcgatccgtttacgaaacccatatgttgatcctttaagttcactacaagtagaacttatttcaacatatcgctcaaatggaagtcaggacgatgagctactgaaagaaattctgttaaccattaatggtatcgccgctggccttcggaatactggctgattttaagacaaccctcttcttttaaagggggttgtttttttgcaatgtaaagaacgtgcacgattctcgctatttaccacaaatacttttccctcctttagaaaaactaagatagtaacaaaatcatctaaaggagggcaccatatgtataaaaaactaatgcctttattattgcctggtttactgcttcttggagcatgtaatgcaaatgacaacggtgaaggagcattaaatataaacaaaacaagcgcgccaacagaagggatacagcgtataaatagtggtcaactaacaattgatcctaactcctatagtaccgatacgccaagctcaaaattccctcatggtgaaatggttcaagacggacaatttgaatttaatgacgttcttccagggggggaacctcgagaatatttacaagaagggttcccggagcaatatggcattggcggcaaggaagaacaacagcgtcaacaaaagatgagaccagatcagaatactggtcaagcccagccgaatgaaaatgctgctcctgagcagggagaagccaacaaagaaaaatcccctacttcagagccttcaggtgaaataacgaaagaagttcagcaggttattgatttaacaaacgaagagcgcaaaaagcaaggactatctccattaaaagctatgccatcattaagtgatgtcgctcaggaaaaatcacgtgacatgcagcaaaaaaattacttttcacatactagtcccacatatggttctccatttgatatgatgagggatttcggggtggactttaatacagctggtgaaaatattgctcagggacaacaaactcctgatgctgtcgttgatgcatggatgaaaagtgaaggtcatcgcaaaaacattatgaacagtagtttcactcatatcggagtgggacttgcacaagatggccattattggacacaaatgtttatcggaaaatagtgatatcaggtgaaggagccacattcgtggctcttttctcttttttcgaaaaaatatctcgaattctatatcaagaagaaggaagtggattcattttgtcgaaacaagatactaaccggttagtaagtatgctgtttttctaaaatagacttacaaggagagattacttatgaatttacgattaaccgacgaacaagttatggtgcaaaaaacaattcgaaaatttgtagagaacgaattaattccgttagaaaatgatgtgcttcgcaatgaacgtgctggaaaacccggtatttctactgaaaagatggaagagcttcagcaaaaagctaaaaaagcagggttttggggtattaatacaccggaagaatacggtggggctaaccttggtcaaatgatgcttgcgatcgtgatgatggaagtttctaaaacgtttgtcccattccgcttcggtggatcagctgataatatcctttattacgcaaatgacgaacagaaagaaaagtatcttcttcctacgataaatggtgaaaagaaatcttgttttgcgatgacggagcctggcgcaggatctgatactcgtaatattaaaatgacggctgtacgtgatggggataaatggattcttaacggtgagaaaacgtttattactggtggaaatgaagctgactttgtcatggtgatcgcgattacagataaagaaaagcatgccgaaacgggtagagacggagttacttgctttatcgtagaccgtgagatgggttggaagtccgaatacattcacacaatgggagaatggggaccggcaggattagtgtttgataatgtgagggtaccacatgagaatattctaggtgaagttgatggcggttacaaccttggtctggaatggattggttttgctcgctggattgtcggtgcaacagctgtcggcgctggtgaacgcttacttaaaatggcgattgactacgcgaatgaaagagaaacgtttggcaaaccaattgcagaacgccaggcaattcaatggcaaatcgcagattctgctgttgagattgaagctgctaaatggctcgttttaaacgctgcttatacgctcgatgaaggaaaagacaatcgacagctcgcttccatggctaaactatatggttcaaatatgggcaatcgcgttgttgaccgtgtcttacaaattcatggaggaatgggttatacaaaggagttaccaatcgaacgctggtatcgtgaagctcgtctctggaggatctatgatgggacagacgaaattcaacgcttaatcattgctcgaaacctcttgaagggacatgtgaaggtaggacaatacgcttaggaggctgttttatgtttgaatcacttattggtacacgatcgactcctgtaaaaaatatcgtggaacgcggctctttgaaagcgttctcaaaatcgatcggggatgaatcaccgctttatcttgatgagtcagttggaaaacgctcaaggtatggagaaaacattgcaccacctacatatccccgagtgtttgattatggtgaaattcaaggcttcgacttgcctaatgtcggattgattcatggaaagcaatctttccactatgagcgtccgcttttggcaggggaaaccgtcatgtgttccacttcgcttgaaaattactatgagcgcaatggaaagagtggtttactaggatttcttttattaaagcggtatggagaagagccaggaggaaaattaatttttacagaagagcaagtagtgattattactgaagctgtaagagaggggatgagttcttgaacatagtagaagaatttagtgtcggaacaccattggaaataaagctccccccagtttctaggttagatcttatcaaatatgcaggtgcatcgggcgatttcaatccaattcatacgattgatgaagaagcttctaaagcaggacttccgggtattattgcacacgggatgtggacaatgggtaacttagcgaaattgttcactccatattatgaagaggtctttcttgaagattattctgttgccttcaaaggaatggttttcttaaatgatgtgcttacactaaaagcttctcttgtatcgatccagaacgatcgttattattttgatgtaactgcgcttaatcagaaaaacgaagcagttgtaaaaggctctgctgttttaaaaaggttttaatcaaataagtgcgcacaaacgaaccttttagaggttcgtttcttttttggttcttttataaattcaattaattccgaaacttattttattccaaatcgtagaataagagagaggaagatacataattaccactaatcggaaaggatgatgaataggtgatggaatttattgggttaataatttccggtattattttgtttttattactcttggcaggcggtatcggatttttcattttcaaaaggcgttataaaaccgcctcctctaatcaagcactaattatcacagggccaaagctaggagatgcagagaaagataatcgcattttcgtcgatgacaatggtcgtagtatgaagatcgtacgtggtggcggtattcggttaaaattgtttcaaacaagtacgccgatcgaccttacctcatttcaactagagattgcttcaccaaaagcatatacttcagaaggcgttccaattcgagcaacgagtgtcgcagaaattagcataggcagtagacttgaaattgttgcgaattatgcagagaaatttctaggcaaaccacaaaaagagaaagagcgtgaattaaaagaggtgcttgaaggtcatcttcgagccatcatttcatcgcttacagtcgatgaaatctacaaagattttaattcggtcaataaaaaagtgaaaaatattgctgaagaagatctcaagaacctaggatttgaaattacttcttttgctctaaaagaattaaaggatgatgacgaagagaacggatacttagaagctcttggacgtccacgtattgcagaagctagaaaagacgccgatattgcagaggctaacgctagacgtgaaacccgaatgcacaaagcgaaaacggaccaagaagcagaagaagatgaaataagacgtcagattgagatcgcccgttctcaaaaagacaaagatgtgaaggaagcggaatacaaagctgaaattgaacaaggaagggcgcgttctgagcagtcctataaccttgagcaagcaagacttaatcagaaagtgaaagaagaagagatgcaggttcaattcattgaacggcagcgccaggtcgaattagaactagaagaacaaaagcgaagaaaaacgcaggctgattcgaatgcctacgatattcgagcaaatgcagaagcggaagcggaacgcgatcgcatcgatggacaaacgaaagcagaaattgaaaagcaaaaaggattggctgaagctgaagtgattcgtgaacgtggtcgtgctgaagctgaagccaaagaactaatggctcaggcaatggagaaatatggcgatgctgcaattattgaaatgcttatcgacatgttgccgaaatatgcgcacgaaattgctcagccgctgtctcaaatttcagagatgaaagtcattgatatgggtggcggtaagggttccactcagattacagacaatgtaacaaaaacaatgacaggtcttcaggcaagtctaaaagaatcaactggaatggatttaaaagccatgcttgagagttttgtctcaagaggacattataattctttcgatacaaaagcttatcctaccgaagaagatgagagcgccaattcaggaatggaagaaaacgcttatgaaagcgaagtagcctcagcatatgaagaagaattggaagaagaaaaaacagaacgtactgaaaatgaagaaaacgaacaaaaagaataacatatgaagaaagcctggcctaatccaggtttttcttttgaatacctgaacgttaattgacgctttttatggaatagtggtaaagtgatgatgttgttatcagaaaagtttaaattttacatatgaacggaggactgtcacatgaatatcgtatctttgctaggcacctttcttgatgatgatcagattagcgtaaatgccactgtgttagagcagcatagtaaagacgaatcttatcatacgccacatgatccagacgtggtcgtttttccaaaaacgacagaagaagttagtaaaataataaaggtagcgaacgaaaatcgaataccgattgttccatttgggctaggctcaagcctagagggtcatgtgattccttatcaaggtggaatctctatcgatttccaattgatgaacaaggttcttgaggtacgaccagaggatttcctcgtacgtgtgcagcccggtgtcacgcgttcacaattaaataaagaattaaaaaagcacggcttatttttcaccgttgatccaggtgcagatgcaacactaggtggaatggcatctacaaatgctagtgggactacctctgttcggtatggagtcatgcgagatcaagttcgtgatttggaagttgtccttgcggatggaagagttatacatactggaagcaacacagcaaaatcgtcatctggttatcacctgaatgggcttttcgttggttcagaagggacgctgggaacatttacagaactgactctcaacgtctacgggattccagaagcaacacttgcaggaaggatcgtttttccaacaattgagcaagcggtttcaaccgttacaaatatccttcatgctgcgataccagtagcaagaattgaactggtcgatgcgcgttccgttcaacaagtgaacaaaacaaatgaaacgaactacattgaaaagccaacattatttatcgagtttcacggaaatgaagctggactgaatcaagatgttgcgtttgctaaaagcattgctgaagacaaccagtgtgaggagtttattttcgaacatgatacgaagaaacgagctcttttatgggaggctcgacacaacctcgcatactcgttcagtcatggatctccaggtaaaaagatgatggtaacagacgtctgcgtccccatttcagaacttaccggtgcgataacagacgcaaggaaaacaatcgaaacttacggattagatggtgcccttctcggtcatgtgggagatggaaactaccatgccatcgtcatgatcaatcctgatgacccgattgagcttgagaaagctacaaaactaaatcaacaccttgttcactatgcgctcgagcgaggaggcacgtgtacgggagaacatggagtaggtacagggaaagcgcaatatcaacaaaaagaacatggagctgctttggatgtaatgttggcagttaaacaaactcttgatccgaacggtattatgaatccaggtaaaatatttgctattgataaagaacagtcttccattatctgatcatttttgaggtgaccgctatggacttatcaactatttcccaactgtcttttcctgctttcatttcaaaaaaaggaatcattctttccacaaatgacgcttttcgctcaatcataaaagacgctgaagaagaaccagttgaagagatttttgatatcatagaagaacacgaaacatttactataacccggtataaggacaaagaaatgttgttcattacagaacaaaaggatcagtacgtctattacatcgggaaagaaaacactcatttctctgatctggaaaaacaggtaacagaacttgaaaaactaaacagggaattggattcaattattgacaattcctatgacggaatttatattaccgataacaaagggattacattgaaaaccaatacagcgattgaacgactaactggtatcccaaaggaatattacattggaaaaaatgttgatcgtctagttaatagaggtatattaaaagattccgtaacaaaaaaagtactgaaacaacgccgaactgtatcagtcgtacagaataatttcgaaggaaaagaaacgttgattaccggtagcccaatctttaacaataaaggtgacattgaaaaggtgatcacgaacatacgggatctttcagaattaaatagacttatatccgagttgaatagtgtccaaaaaaagaatgctgaatatgaaaaagaacttgaacttttaaaaggatattcaaactcaggaattattattgagagtgaaaccatgaaagaactttatgaaactgctactagaatcgcaaattttgatgcaactgttcttatattgggtgaaacaggtgtcggaaaagatgttcttgctcgatttatctattcaaaaagcaagagagcttcaaccggagactttattaaagtaaattgcggtgctataccacaagagttaattgaatcagagctcttcggttatgaaggcggcgcatttactggcgccagccgcaatggtaagcctggaatgttcgaaatggcagataacggggttctatttcttgatgaagtaggtgaactccctttaaaaactcaagtgaaattactccaggttattcaagataatactattcaacgcataggtgctacgaaactgaaaagggttaatgtaagaatcattgctgcaaccaatcgcaacctcctccaaatggtaacagagcaggaatttagagaggatttgttttatcgcctcaatgtcattccactcttcattcctccattaagagagagaagagatgatattctaccactaatccagttctttctaaatcgaacgaatttaaaatataaccttgataagcatttaaaagccgaccttaaaaactctctatatgaattggattggaaagggaatgtaagagaaatggctaatttaattgaacgaatggtattaaccacttctaaacgtgcgatttctcatgaccaccttcctgccgattataaaaaggaaagggcagatcctcgtattcacagccttaaagaagccgttgaaattacagaacgtaacgttctagaagatgcctattcaaaatacaaaagcacatatgaaatttctcgagttttaaataccagtcaaccaactattgtcagaaaactaaggaaatatcaaatcggccaatcttaacatatatactgcaccactcgcccctggcgagtttttttattggcatcaaacttgcaatacttaagggaaaggaggcagagactatgaaaattggaattgctggaacaggagcagtgggtggttatattggtggcatgctagcacttgctaatcacgaggttgtttttttatcccgaggaactaacttgctcgtgatgcaacaacgaggtttgaaaatcaaaagctctgtagatgaagttatcattcataaggagtttacacattcactggaaacatttagcgatgtcgatctcatcatattaagtgtcaaatcaaacgatacaatcaatatcgctagacagttgcgccaaaatatatcttctagtactcccgttcttcttatgcaaaacggagtgagtaatgaagagattgcaatagaatatttcgattctacttgcctatatacagctgcagtttatttaacatccagaatgtcagaaccaggtatcatcgaggtggcaggtaaaccaagattaactatagggtcattagaatctggaaatgtagaagaaacaaagtctctcactcatttatttaatgaagcaggaattcaagcgaagacatcatcaaatattatgcgagctaaatggaagaaacttttgtggaatgtaacatttaatcctctttctgcctacgcaggggtcacagtaggacaaatcatcaacgaaccagaactgcgtgaaatagctgagagggctttagtcgaaggaatgcagatagcgagttataaagggttctgttttcaggatgagctgatcaatcaaatattcataggggcaaggaaagcagataatcattatacaagcatgctccaagatcgtctaaacggaaaacaactcgagattgaatcgatatgtgggtactttttgaaagaagccactaagctagatgtttcaaccccagttattcaatcactttataacaatttagcaactttagagaaagaagctttccgctaaataacctttacttaaaatcgtttcacagatttatggcaagtgattcatttttgaatcagtgcataatcatacgattatatgattccttttatcgatagctatgttaatatacaggttgatttttgctgcccttacgtctgttaatgcttaaaaccgataatattataataaaatccatcatattcattgcgctaatagtttgtatttcactactaacagaacttacttactagaaatgattaaaaatgatacaaaaatgaattagtaattcatttttgtatcatttttttgttttttcttaagcgtttttatttccaaaatgaatataaacctcgtaaataagctgtttttgaggtttttttaaaaatggcataaaacttgctatttaattaaagtaaccaaagtaagggggaacttattatgacagtaactattacaagtgaattacaacagatgaaaaccatgattcgaaactttgttgagaatgagatcgaaccatttgctcagcaaattgaagaagaggatgcaattccagagcatttaatcgaaaaagccaaggaactcggtctgtttggaatgagtatcccagaagagtatggaggaattggattaaattctgaaggaaaagctgtggtattagaacaattaggacgtacacacaacggctatgtatctttaattagtgctcatactggaattgggagtactggactggtgaaattagcttctgaatcacttaaacaaaagtacttacctgatatggcagctggaaacaaaattgccgcttttgctttatctgaacctggagcaggatcagacgcaacgaatttatcaaccaatgcagtgaaacaagggaataaatggatcattaatggtatgaaacatttcattacgaacggccctgttgcagatgtctttacagttattgcatctactgataaatcaaaaggagctaaaggaggcattaccgcatttctagtagaaaagaattttccaggactaattgtaggaaaacgcgataaaaagatgggattgaagggatcgtatacatgtcaaattatatttgaagattgtgaagtacccgaagaaaatgtgatcggtgaaattggaatgggatacatatcagccctgaaaatccttggtgagggtcgaattggattagctgcccgagcggtgggttcctgcgataaattaatcgagatgtcagcaagctacgctaaagaacgtattcaatttggaaagccaattgcatccaatcaagcaattcaatggatgcttgctgatatggcaactgaaacggaggcagctagggcactaacgacgatggcagctaagaaagttgatgaaggtaagaaagttattaaagaagcttcaatggcaaaactctatgcttcggaagtattcaaccgtgttgctgataaagctgtacagatccatggcgggatgggctacgtctctgattacccagtagaacgcttttacagagatgcacgaattactaagatttatgaaggaacaagcgaggttcagcgcatgattatttcaagacatattttagatgagtattaatccattgatctactcgaacgacggatacagcggaggaaggagctggattgtttgagtcaaagttattctgaaactcccgttcagaaaattgatactactattaaagataaacccgcctatatcgaggaaatatggtcaacgagaaaagcaaattggaatctaacaagaattctcgttgttttaacatctgttttagcaattggattatcactctttcacatttatacagctggttttggaacgctttcctcctggcaacagagaagtatacacgttgtctgggcactactattaatttttcttatctttccatttcgaaaaggtaagaagtttggaccgattgattttctattcgttttagcaactttagtagagactagttttattctttttcaaggtgacgccattcaaagtagacaaggtaacccaaacatgaccgatatcattctcggaagtattttcataggattagtacttgaagcaacacggaggacaaatggctttcttatggcttgtattggattattcttcatgggttacatctttttgggtccctattttcctggtgcgctagctcatccaggagtaagatatggaaaaatggttgatcagatgtttaatggcacacttgggattttcagtgctcccatatatattagttcaactgtcttaatattatttgtgatttttggagcgtttttaatgcgttctggtggaggacagttttttacgaattttgcttttggtgcacttggtaaccgtgcaggaggacctgcattatcagcagttggtgctagcgcaatggttgcgaccattacgggaaatggagcggcgaatgcagctgtaactggatcctttacgattcctctaatgaagaaacttgggtatagtaaacgattcgctgcagcggtggaagcagttgcttcacagggtggacaaattatgccacccattatgggagcatccgttttcattatggctgagactacgggtattccttatattacgctcgcgttatatgcattaattcccgcaattatatacttcttaattgcaggttttatcgtctattaccatgcgaaacgtttgcacatggaaggcattccgaaagaacaacttcctgatcctaaaagggtacttttaacacaaggctatctatttcttccaattcttatgattatttatttaatgattgatggatttagccctatgaaagcaggcttttacggaatcatagctacgattcttttaagctggattagaaaaatgacgagaatgaatttattggatattctcgcttcactagaaagtggtgccagaagtgcactagcagttatatctgcctgtgcgactgcaggtattattgttggtgctgtatcgctaacggggcttggtcttacgttctcaagatttatgattgatactgcgggaggtcatttatttcttcttctcatcatgttagccattgcctcaattatccttggtatgggaatgccaaccgtttcggcatacgttatccttgccgttttaggagttcctgcgctagtagaaatgaatgttaacgttgtggctgcccatatgtttgtattttattttggcgtgatgtcaggacttactcctccagttgcaataacagcttatacgacggcaggaattgctggatctaatccatcatcaaccgcgttttacgcgattcgtattgctcttggcggattttttgttccatttgtatttgtctataaccccgaattgttattacaaggcggtgatattcctggcatcataactgcattgatatctgctgcagttagttgtgtccttttcgcaggtgcagtggaaggatattggtttggacatgttactccactaaaaagatcgattttatttatcagtgctatattacttgttatgcctggtttaatcggagatctaataggacttcttcttgtcgtgttcacgttcatctggcaacgtactcatcgtgtcgggaaaagctcaccacaagaaataagtggataaaaggaggattttaatgcgtaaatcattaattagtctattggtaacgcttacaataatcgtaatgacagcttgtggaaatagtgcttctagtgatggagaaggactcaaagcacctgataagttcttaaaagttggttcgggacctatgggttctgggtggtacccgattacgactgcattatcagaactatatatggatcacttttctggacttaatgtttcacagattgaaggcggaagtacttcgaaccttaaatcacttcaaattggtgatatccagtatggcattcattatacttctgattttgctgacgcagttaaagggactggaagctttgataaaaaattagacaaggtagcaggacttacttctctgtatccggtttatcagacaatcgcgactcttgcagataatgaagagatcaataaggtggaagatatcgttgatcaacacatcttcttaggtccaaaaggcgggggtggcccagttgccttctggagaatgatgaaagaatacgggatagacgaaggttctattaaagatgcaggtggaaagatttcctatggtaattattcagatggtgcctctatgttaaaagatggcattgtcgatgtttttgttggtggtggggctcctcaagtgacctctcttcaagagatagaggtaacaaaaccaattaaggttattccaattgacgaagaaaagcttaagggaattagcgaaaaaggattggggatttcttatgatagccttccaggaaatacgtataaaggtctagaagaagagattccaacttacactcttgttgcgatgtttggtgtccgctcagacttatcagaagattacgtttataacctaacgaaagtattttgggaaaaccaggatccttttaaggagcaaatcccacaaagagcaaagaatttcacgatggaaactgctttagatgggatcgacccagaaacgcttcatccaggagcaaagaaatattatgaagaagaagggatcattgattaaaaaagtaaaagtaattcttaaaggtggtaatggcattggataaacttattgatcgaccatggtaccgattttacccggaaatcatgaacgattccccatcactaccggaatgttcagtataccaattgcttcacgatagtgaaaagaagtatggacacaaggtagcgattcgttttcaagatcaacgaatctcatataaagaattaaaggacacagtcgatcggctcgcctcatcctggcatgaattgggaatgaaaaaaggagaacgcatcggcttgatgttatcgaatcagcctatgtatgtctatgcgtattatgcagctcagaagttaggcgccactgtcgtacagataaaccccatgtatatgccaagagaaattgaagaaatttcacacgaggtaggtctctcttacctcgtgacagagagtaagtatttggagaaacttgaaattgtaatgaaatcatactcttttgatcagatatttctttcagatcagaacagtcccgttttattacctaatattcacgtcattgaacgacttatgaaagaaaaggcacctgaccaagaagctgttccaattcaagcgaaagatgatattgcggtcatccaatttactggtggtacaacaggaaaaatgaaaggcgctatgttaacacattataatcttgtttctaatgtgattcagagttatttgatgtacggaaatgatatgaagctcggtgaggaaatcactttaacggcaactcctctttatcacgtttacgcaatgacaagcggaatgaatttaagtatttatattggtgccaccaatattattgtacctaagttcgatgtaaacgacgtgttaagaatcattagggaaaacaagcctacttttttcccgggtgtcccaacgatgtacaacgcttttgttaatcaccctaaagtaaaagagtatggactgaattgctttaaattttgttccagtggctccgctccacttccaatcgaagtgataaatcgttttgaagaaataacaggcgcagttatcggagagggatttggtatgtcagaaacatccccttctacgcatcgaaatccaccgttcggagaaagaaagattggtagtattgggatcccttttccagaaacagattgtcaaatcgttgatgaagatggaaatgaacttcctcataaaagtgttggagaactcgccattaaaggacctcaggtaatgaaaggttattggaataaaccagaggaaacgaatgagagtataaaaaacggatggctactcactggtgatcttgcaacgatggataaggatggttacttctatatcgtcggtcggaaaaaggaaatgattattacaggaggattcaatgtttatccgcaggaaattgaaagcgttctttatgtacatccttccgtgaaagaagccgctgtgattggcattcctcatgaatacagtggcgaaagagtgaaagcgttcgttgtcgttaaagacagttccatttcagaagaagagctcgttgcctattgttacgagcatttaacaagatacaaagtacccaagcaaattgagataagagattcattgcctagaaatacagttggaaagttacttaaacggcttctaattacagaagaaacgatcgaaacagggaggtaaagagtatgaatatagaacgtgttagtaaagttggtgtgattggatcgggaacaatggggtcacagattgcgatggtttgcgcccttgctggatattcagttgttttaaacgatatagaagaaagtagtcttaataaagccagaaagtcacttgaaggccatatggaacgcagaattaagaaagggaaattgacagaaggacagatagaagaagcttttcagttgattcactttagtacttctctaaacgatttcaaaaaagtcgatcttgttatcgaggctatcattgaaaagctagaagtcaaaagagaactgtttgctaaactcgatcaaatctgcccgaatcattgcatcctcgcaacaaatagctcgacaatcgtaagttcaaaaatagctgacgcaacgaatcgccctgaatctatatgcaacatccattttttcaatcctgcactcgtcatggatttagtagaagttgtaaaaggaccgcatacgtctgatcaaacagcggataaagcttacgaatttgtagaatccatacacaaaacgccggttctattgcaaaaagaaatatctggttttgttgcaaacaggattcttggaaaactaatggacgaagcagtttacttactcgagaacggttatgcaacacacgaagagatcgatctcgtttgtacgaaagcattaaatcatccgattggaccttttgcactgatggaccttactggtatcgatgtaaattattatgtacgacaacagcgatatgaagagtccggaaatgaagcagatcgaccagcacgaattgtaaaagaaaaagtaaacaatggggaacttgggagaaagacaggcaaaggcttttatagctatcaaacttaaatgatgggagttgtttgataatggagaatatccttttcactcaagaagatcaccttgcttatgtaacgatatcacgtcctgacgtaaggaacgcattgaataaagaaacattaatcgaattaaaacaaaccctggagaaacttgaagaaatggacgaagtaaagtgtgtcatcatcacaggtgaaggagaaaaatcatttgcagcaggagcagatatttcacaacttgaaaagaaaaccatgtatgatgcattcaaatcaggtagcatgcaggaaatctatgattatatcgaaggctatacgaaaccaaccatagcaatggtaaacggttatgcgctgggtggtggatgcgagcttgccatggcatgtgacataagagttgcagcaactcatgccaaatttggcttacctgaactcaatctctccatcattcctggagcaggggggactcagaggcttacaagacttgtcggtagagggaaagcactagaaatgattttaacaggcaaattgatctcaagtgaagaagccgctgcgattggcctaatcactgaaatggctgaaataacacacttaaaagaaaaaacagttgaaatcgcccaacaaattattagtaaaggtccgatggccgttatgatggcaaaactcgccgtgaatatgggagcggatacagatatgaaaacaggtttactcattgagaagctgtcacaagcgattctttttgcttcagaagacaaaaacgaaggaacgagagcttttcttgagaaaagaaagcccgtttttcaaggtaaataaatggagacaaatataagcactatttatgatcgtgttagaactgattttgaaacaagtccctttttcaacttattaggttttgaattacgatcgattactgaagatgaagtcatccttgagctaccaatagaaagaaaactattaaacacacatggaagtctgcacggtggtgtatatgcaacgatgatcgacaatattattagtttgaaaatgcgttctatgatcggcagtcctgtcatcacaattaacttaaccataaactatattgctccaatcacaagtgggaaggttattgcaaaagcgttcgtctatggagaaggaaagcgaacgaaaatgggtgaaggagttgtgatggatgagaacggaaagcttcttgcaaaaggaagtggaacgtttaaagtgattaaatcgaaagaacaataacgatcgttaaagaaaagaggcgttgcatttgtcaattcaaaaaatagcagtaattggtgcaggaactatgggaagaggcattgtctattctgctgctgcagcaggactctcggtcattcttcatgatgtcagcgaggcgtcattagaaaaatccaaatcttatctacaaacgcaatttgatcgatccgtaagtaaagagcttctttctaaagaattagctgatgaacgatttagagaaattaactatacaacagaactatctgaagctgccagggatcgtgatctagtcatcgaagcagttcttgaaataatggaactgaaaacaagtatttttcaacagcttgatgaccttacaccagatcatactatcttagctacaaatacatcaacgatgagtccaactgaaatcgctgcccaaacaaaaagacctgatcaatgtcttgcccttcacttttttaatcccgttccaaagatgaagctaattgaagtcatttgtggtttagaaacttctgaagaaacgattagccaagctatggcctttggggaatccatcggtaaggaatgcgttcgaatcaatgaatttccaggctttgctgtcagccgtatgaattgtctgatcggtaatgaagctatgaatatggtcatggaaggtgttggttcacctgaagacatcgacaaagctatgaaactagggctaaatcatccaatgggtccactagaactcgcagatctagttggtctcgatacaagacttcgtaacatgcaatatttatatgaaacgctcggagaaaaatatcgaccatgcccgattttaacgaaatacgttaaagccggaagactaggtagaaaaagcggaagaggattttatacatacgattaaaaaggagagacaaacatggactttcaattagatcaggacattcagtttcttaaaaccaacatccgaaactttgttgaaaatgaagtcgagaaggttgccatgacgattgagcgcgaagatcgtataccagaccgaatcattgagatgtctaaagaaatgggattattcggcttaagtattccagaagaatatgggggcttaggtattggtatggttggaaaatgcgctctttatgaagagttggggaaaacacataatggttttactacactgataggtgctcatacaggtattggttctgtcgggatcgttgaactcggcaatgaagaacaaaagcaaaaatacttacctgatatggcaagcggaaagaaaattggtgcattcgccttaaccgaaccttctgcgggatcgaatgcatcgaacttaaaaacaacagcagttaaagaaggaaataagtatattttgaatggaacaaagcattacattacgaatgccactgaagcagatatttttaccgtaatggcagcaacagatccatcaaaaggtgcaaaaggaattacttcatttatcgtagaaaagaactttccaggctttcaggtcggtgcggttgaagaaaaaatgggattaaaaggatctcactccgctgagctaatttttgataactgtgaagtacctgaggaaaacgtgcttggtgaggtaggaaaaggttacgtcaatgcattgaaaattttagcgaatggtcgagctggactcgctgcgcgtaatctgggatcctctcaaaaactattggatttaagcatggactatgtacaagaacgcattcaatttggagtaccaattattgaacatcaggctgtcgctcacatggtggcagaaatgggagtagagattgaagctctaagatcgtttacgtaccgcgtcgcctggatggtcgatcaaggtgaaaaagtaatcaaagaagcagccatgctaaagttatacggatctgaagtttacaatagagtggcagacaaagcgctacaggttcatggaggaattggttacatttccgattatccaattgagcgctattttagagatgcgcgtattacacgaatctacgaaggaacttctgaaatccaaaagaacatcatcgcaagtcaacttcgaaaagagtacagctaaaggaggatgaggtatgactgaaaagattgtcattgttgaagctgttaggacaccagtagggcgttatgggggcgttttgaaaaaatttaattcgggtgagttagcagctcttgcaattaaagaaacgatcacaagagcagggattactcctgaacttatagatgaagttatacttggtgaagtacgccaaacaacggaatcatcaaatgtagccagagttgccgctttaagagcaggagtgcctgccacctcacccgcatttacaattaatcgactttgcgcttctggtatgcaggccatcgcctcagctgcccaacaaattcagtccgggcaggctgagattctcgtcgctggtggtacggaaagcttaagtcacgcaccgatctatttacgcgacagccgctttggtggagatagaacaaaattagtagattccaatcttgaagctggtcaacaaccggccgagttatatggtaataatctaggtatgggcattaccgcagaaaacgtagcggaaaagtaccagatttctcgagaggatcaggatgtttttgctgctgagagtcagcgacgtgcggcagaagccatcgaggatggcgtatttgctgaagaaatcgttccggtcgaggtaaagtcacgacgtcagaccaacctcgttaaccatgatgaacatccgcgtccaggaacaacgatagaaaagctttcggtgttaaagccagtatttaaagaaggcggttcggttactgctggaaattcatgtggtagaaatgacggagcggtggcgatgcttgtgatgacggaagcgaaagcacatgaactacaacttcaaccacttgcccgaattattgactgggctacctcgggcatttcacccgaaatcatgggggttggtcctgttccggctgttaaaaaacttctagaacgaacaggaaagcagttaaatgatatcggattaatcgaattaaacgaggcattcgctgcacaggcgctcgcggttatccgtgaacttgggctccagccagataaagtgaatgtaaacggtggggccatagcgcttggtcatccccttggcgctacaggtgcacgcattttaacatctcttatgtatgaaatgaaacgtagagatgagcgtttcggtatcgccacactgtgcgtcggtggcggacaaggaatggcaatgatggtagagaatatggttaactagaaaagacgggataccgtctttttttattcagccgatactgctttacacactactcatttagcaaaaaaataacgagctaaaggaggtcaaaaatgaaaataagacaatacgaacctaaagacttagatcaaatcatcgaattatttcaacaaaccgtctatatcattaatcgacaggattattcagcgaatcaagtaaatgcatgggtgaattcaacgactaaatcaataaggtattcaaaatgggcacaagaatttgagcagaatttcacttatatagctgaagaagaaggagaagttgttggctttatcgacttgaccgcagccggctatcttgatcgtttatatgtgcatcgttatttccagagagcgggaattgcttctctgcttctctcagaaattgaatctactgcacgaagtcagcagttaaataagatcaccacagaggctagcattacagcacgtccattttttgaagcacaacattttcagacgatcaagaaacaaactgttgaaataagcgatgtcaaaatgactaacttcttgatggagaaaaagttgaaacgcttttagagggaattctaacgtgcaaatttgaagtagttgatcgatgagatttaacagtagtattaaacttaaagagaaattgcttcgaaaaaaagattgactttacactgtcaaagatgagataggagagatcattgaaaaaaagagagacggttaaatcagcagtcagttcatctcatcatcaatatttaatttgaaattcttttgagtatccaatagcggcaaggatagtcccagctgtttgagcataacttcctagcgccaaaattttctctccaagtttgatccgttttcttttaataaacaaaagcccaattgtctctactgagagcgcataagtctgaatggtcaatcctgttgtaattaatctagcataagctgattgacttaggcttgaaccttgagcttcaaagccagcaccgattgtttgaaccacgcctccaataatatcaatagttagaccgtcatcttcgtctaagctaagtgcttgagcgcctcccaccacattagaagcattacctgccgcctgtagccaggaaccgagaatccctagcatttcctcctgcttaccaactgataaattcgtccgccctatagcttgaagcgaatctcctgttgcctcaatcgcattcccaatagcatacaggtcgccaccaacttcatcaacgatttctcctttttcccccattgcaacaagtgtatttccgatcgaaacaatacctgctcctagaacttgtatccaagctcctataagtataatcgaatccctgtacacctccaatactgcatcctctccttatcatttcttcatcctattcaacgataagaagcaatgtttgtatgcttatattcataaaccatgaaatgacttcatagtagagtaaatattcctctttttctctttatgctggaaaactccactaaaaactaataagtacatattccattttatggttactattacattcaatagacctacaaatatcccacctaaccaatgagaatagttctcaagtatcattgaatatgataatcattctcatttataatgttacttgcaacacattgaaaatgattatcatttaaaaaggatggttctatatgactgttaaagatttagccaataaccagacactgcttgcccaacaagaaagaagagaatcgaatgcaagatcttatccaagaaggataccgatcgcaattgatgaagcagaaggtatttttgttacagacgtggacggaaagcgatactatgactgtttggcgggtgcaggaacacttgcacttggacataaccatcctgtagcgatagaagcaatggagaagattcttcgcgataagcgaccgttacatacattagacattacaacgccagtgaaagaagagtttgtgaatgaagtgtattcaagcttaccagaacaatttgccgatcgggctaaaattcagttttgtggccctactggcggggatgccattgaggcagctttaaaattagtcaaaacagcaactggaagaagcagcatccttactttccagggtgggtaccatggttctacacatgggacgatggcgatcagtgggaatcatgctcctaaacaatatgttcaaggcttgatgcctgatactcacttcatgccttatccttacgcctaccgctgtccattcggaatgaaggatgaagagggacacagggtttcaagtacctatatcgaaaatcttctcgatgatccagaaagcggcattttacccccagcagccatgattcttgaggtcgtacagggagaaggggggtcaattccggcaccgatcgaatggcttaaagaaatgagaagaatcacgagtgagagaggaatccctctcataattgatgaaattcaaactggcatcggtcgaacgggtaaaatgttcgcatttgaacatgcagggattgtaccggacgttattgtgctttcaaaagcaatcggaggaagtttacctctttccgttgtgatttatgatcaagatcttgataagtggaatccgggtgcgcacattggtacttttcgaggaaaccaaatggcaatggctgctgggactgcttcgttgaaatttattaaagagcatgagcttcacaagcatgcagctgcaatgggagaaagaatgattacttcactaaaagatatgcaacaccaattccgtgaaattggtgacgttagagggagaggattaatgattggggtagaaattgtagaccccacggaagtccaatctgcttcaggaagttatccatctcaccctgcattagcaagccgcattcagagagaatgttttaatcgagggttgattttagaagttggagggagaaacggcagtgtcgtaagacttttgcctccgctgattataacgaacgagcaagtgacagatgtcctcacgattattgaagaagcagtaaaagttgctgtggagtcaatcgaatgacaataacgaacaaagaaattaaagcagaagtgattgaagaactctttcttcatagtggagaaagtggacaagcttcttttcaaaagcaaatgaccgaaatgatcgccatcatcagtcgaacctttcaggatgcaaacgctccatacattgggaagcaacccaagatggttcaagatgaaatcgcaacactgttcaagtttcctaatgaaactcaaaatttcaccgaactattgcaagaaatagcggaacctatactaaaaaatagtcttcaagtttcaaatgaaaaaagcatcgcccatttgcactgtccgccgctcataccatcaattgctgcggaacttgttatcagttcattcaatcagtctcttgattcatgggatcaaagcaccgctgccacgtacttagaacaggaaatgatcaagtggctgaaaaagaaatttggctatacagccagttctgatggcacatttacaagtggtggaacgcaatcgaattatacaggacttttattagcaagggatgaattttgttatcgcaagtggggacgtgatgtcaagcttgatgggttaccctctcaatttcacaaattaagaattctttgctctgaggatgctcacttcaccgtacaaaaaacagctgcccaactagggctaggagagaacgctgtaataaaggtaaaagttgatgagtaccaccggatgttgccgatacacttaaaaaaacaattgatagatttaaaagaaagagatctgttaccttttgcactcgtcggaacgtgtggcacgactgattttgggagcatcgatcctttagttgaactagccacgatcgcaaaagaggaagaattatggttccatgtcgatgcggcatatggtggagcacttattctttctgaatctcacaattggaagctagaaggaattaaagcggcggactccattacagttgattttcataagcttttctatcaaccaatctcatgtggagctttcctcgtaaaaaacagacagtcctttcgttttttgaatcatcacgctgattacttaaatccatttgaggatgaaggggaagggattccaaacctagtcaacaaatcgattgttacatccagaagatttgatgcttttaaacttttcctatcgttgaagaccgttggaatcagtcttttttctgaaatgattgacgcgaccttttatctggctcaagaaacagcgaattacttatctcaacaacctaatataaaagttgaaaacaaaaatccagaactcaacacggttatttttcgatttgaaccacagaatccatctggagatgtgtgcaagttaaatcgaaaaatacagcaagaaatgctctatgagagcaaagcagccattgccaaaacatcggtgaatggtcaaacctatttaaaattcaccatgcttaatcctagaacaaaaatgaagcacatttatgagattgtagaagaaattcaaacgctaggatggaaatggaggaaacacaagtgaagtttgccaaagactatgcagaacaagctacgatgcagagcttcctaaattgttatttacgcgaaactagccattttactgaaatagaaaaacctgaagctttacgagatttatcagctcagaaattcatttcctgtctactagaaaaccagggaattgagctgattttaccagtatcttattggtctctaactggacgacatatctttcaattcccattggtttatcgcatagaaaatggcgcatttaacccgcttgattatcttacattaaccacgttaattgtaaaagaactcctgatcgatcagaatcgcttagatgcagaagatgaattgattatgcggatcatattaagctgtcaaaacatgaaatcttatattgaagaaagatacaaagacaaaaagcgcttatcggatgaaacatttgattacattgaagcagaacagtctctcttacttgggcatctgctacacccaacacccaagagtaaacaaggtttatcaatagaagaagatcgtctgtactcacctgaattaaatggtgaatttcaacttcactattttagtattcatccttcaatcatcttagaagattcaagtttatcactatctgcaagtgaactgatgagagaagaattacaagcggatgaatccgttaatcaagaatggcttaatcaatttgagaagggggttcttattcctgtgcacccacttcaagtcagtgttctcttaaaaaacaaacatgtggttcactatattcaaaaagggaaacttgattatctcgggccagtggggaagatgtatacggctacttcttcatttagaacgctttatagtcatcaatctaaatatatgctgaaattttcggttcccgttaaaatcacaaactcacttcgcgtcaatcagcaaaaagagcttgatcgaggcgttgaagtttctagactactgaaaacaacgttaggaaaagaactaaagagaaatcacccaaagttcgatatcattcgtgaccccgcttatttgaatgtcgccattccggatcttgaacctggttttgcagttgtcatacgagaaaatcctttctatgaaaatagtgaaaacacgagcttagtcgctgctctttgccaggatcatgcgtatggcgggaacgctcgtctacattctattatcacttcaattgcgagaagagaaggacgtgcaattgaaaaagtaagtttagaatggtttgatcgctatttgtctctctctcttgatccaatgctatggctctatcgcaactacggcattgctcttgaagcacatcagcagaattctgtcattaaattatcggaaggttatccattaagcttctattatcgagacaatcagggttattacttcagcgaatctatggctgataagctctcaaaccttcttccagatttaaatgagaaaagcgataccatttgtgctgatgaagtagcaaatgaacgttttcgctattacttctttttcaatcatttattcggattaattaatgcgtttggagtaaacggattgattaaagaacaacacctaatagaccttttaagagaacgtcttctgcggtatgaagcgaaacatccatcatctcttgtaaaaagtttactagaagagcctgttttgccgtgcaaagcgaatttactcactcgcttctacgacatggatgagctggtgggatcactagagacacaatcggtttatacaatggtgaataatccaattgctcaggaggttgcagtagaaaatggctcataagcacgttgaagtggatcaagaatataaaaccatctcattttctgaggtgagctttgaacgcgatgtacatatgattcatcggtggatgaacgaagcacatgttttccctttctggcaattaaatataccgttagaagcctataaacgtcatttgcaaaaggcattaaaagacaagcatcagaatctttacctcggtcttataaacaacgtaccgatcagctactgggaagcttactgggtagaaggagatatcatggaaggcatgtatgaaaataaaccttatgaccaaggtattcatctcttaattggagaaagagacttccttggtaagggatacgcccttccgcttcttcgagaaatggtgtctttacaactgaaggaaaagcggacaaaaagagtgattgctgaaccagatattcaaaataagaaaatgattcatgtgtttgaaaaatgtggctttcgaccgcaaaagccgattaagcttcctgataaaacagggttattaatgatttgtgaacgtgatcagtttgaaaggaagtgggggaatgaatgaacacgtatatgatgcaattgggatagggattggaccatttaatcttggttttgctgccctaacagacgaactggatgaggtagatgtccttctgtttgatcggaaagaagagtttgattggcatcctggaatgctgattgatggaaccactttacaagttccatttttcgcagatctggtcagcatggcggacgtgaaaaacaaatttagctttctaaactacttacaaattcataatcgcatgtatcacttttactttttagaaaagtttcatatccctagaaaggaatacaatcactactgtcagtgggtatctaagcaactttattcatgccgatttggttatgaggtgatggatgtttcattacatcaatcacgagaaggagcatccgtttatcttgttcaagttcagcatgttagaacactagaaattgaaacgttccttacaaagcatctcgtaatgggtataggttcaataccttccgttcctaaaccattcaaatctaagctcagtgaaacggtttttcattcatcagattatatggagaagaaagagcgagctgtacaaggaaaatctattgctgtcgtcggctcaggtcagagtgcagctgagatctttttagacttagcgaaagagcaggaaaagcaccattatgaattaagctggtatacaagatcaaacgggtttttcccaatggaatactcaaaactcggtcttgaatatttttcaccagattacacggaattcttttacagactttcacaagaaaagaaagatgggttactgaaagatcaagcattgctttataaaggaattagtgcggaaacgatttctgaaatctatgatgtcttatatgagcaatcgatcggaaatcaacagccggctcatctacaagcaatgagccaaataaaccatctggagatgaatggagagatatgcaacgtacaaggaagtcataccgtgacaaaggaatcgtttgatttcgaatctgaagtcatcattcttggtactggctacacccaaaacatgccaagctttttgccaaaatccctattaaataaagatcaaaaaaatcgtcttgaaattacagaagattatcgtttgagtacgaaacataacagtgaaaatgagatttttatacaaaacggtgaacttcacactcatggggttggggcacctgaccttggtcttggcgctcatcgaaacgccgttattattaatcaaatcgctaagaaagaagtatatcccgttcagccaaaaaatgtcttccaatcttttggagtggtcaaaaaacctgcattaataactaattagaaagtggtgaacgtatgtattctgataaagacttagatcatattttatcaaaagaaagctgggaactagtgaatcataaacttctcgcaaaaatgctttcagaatttatgtacgaggacatgattacacctgaaatcattcaagaacaagaaaaccatagcctttttgagctacgtgtttctgccaagaaaacatatcagttccgtgcagcaactcgtctatttgatagcttcgacgttgattggaaatcgattcgtctcttttctcacggaaaagaagtgaaggatggagcaatcgcttttcttcttgatgttcaaccgctgatcggcatgtcggctgaaacgactgctcacttaataaaagaaatcaatcaaacccttattgcagatgctcatctgttatcaaatcgcgtctcctcggatgacttagttgaggaagactatgctagattagaaggttatatgaccggtcacccttggatcacctataacaaagggcgaattggatttgactacgatgattacttggactttgcacctgaacatcagaatgaagtaaagctttcctggatcggggttagtcgtgaaataagctcttttcaatccgttaaagatctaacttttgatgcgctcataaacgctgagttaagtgttgatgaccttcaaaaattcaatgagtttttactatccaaaaggctagatcccaccaactttctcttaatgccagttcatgagtggcagtggaaaaatgttttgattcagaattttgcagaagaaattgcgaatcaaacgattgtaccgctcggggaatctagtgacgcttaccttcctcagcaatccattcggacgtttgtcaatcaatctcatcaagacaagcatcatattaagttgccaatgagcattttaaatactctcgtctataggggcttacctacagaacgaacgctcattgccccgcaaatcaccgaatttataaaaggaatctatgaaaacgactccttcttaagagatgaatgtaacgttattttaccaggtgaaattgctagcattaacgttgatcatccttattatcaaaggcttgaacatgcaccatatcaatacaaagaaatgcttggggttatttttcgtgaaagcatctacacataccttgaagaaggagaacaagctattacattagccgcattgctatatgaagaccatgacggtaaagcctatattcaaagtatgattgaaaagtcagggatttcgacgcaagaatggatatctcaatttcttgatgtcacgatgaaaccgctgctgcattatttgtaccagtacggcacagtcttctcgccgcatggacaaaacaccattctcgtattgaaagagtacaaaccgtgccgactggctgtaaaggatttcgtagatgacgttaatatcagtgatcaaccattcgaggagttacgtagactgtcgcacgagttaaaaacggttcttcgcagtgaaccaccagagggacttacgcaatttattttcacaggtttgtttatttgtcaccttcgctatttgactaatattctagagcataacgaaatgatgcctgaagatgagttttggaaaattctcgcggaaacgattcgctcctatcaagaaaggtttcctcacctagaagagcggtttaagctgtttgatttcttccaacaatcatttacgaagctatgtctcaatcgaaatcgcatgatccaagaaggttattcgtctggagatgatcggccccacgcatcagaattcggtaaagtaaacaatgcactttcttattataaaggagtaacaaaataacagagtgacgggggtaattcccgtcctttttaagggagataggtagaatggctttcgaatgctcgataaccgaagaatccggtcgaacaatttcttttcgaccggtgaatgaagaagatgttcctattttacacgaatggatgcatcagaaacacatttacccattttggaagttaaatttgccaattgaagaaattaaagtctgggttaaaaactcgatttcgtcacggcataagcgcgtttttatgggctatctaaatgatgaacctgtttgttacgtaattgggtacgatgtgaggcaggacccaataagacattactattcgattaaaccgagagatatgggaatgcatttgcttataggacctagacgactattgaacaaggaagatggggaaacaattattagagccatgacattgtttttgtttgaaaagtttggtgcaaatagaatgattggagagccagattatcgaaataggatcgtcattccaatacttaaaaaacttggtgctaatgtgataaaagagattcaaatcaaggaaaaaaaagcaaagcttatactggcgaaccgagatgatttttatcaaaatataggcgattcaaaaatcacttcatcctttcagcttgtacattcccctgattacgagtgggaaagatttgatgaggcgatttatcatggataatcgtaaacttgattcgcaatttgaaagattattaaaaaaaatcgctgcaagaatgaatgcattgcaacaccctcctcttgattctctaacaccagaaatgtcacgttattactataacgaagctcgcgcatactttacacctattccttcaactcaaatatgctcagttgaaagaagaatcggcagccatcaaattcctattcgtatttatcaaccagaaggttttcatcatcttcctgtattcatctacatgcatggtggaggatgggttttcggagaccttgatagctccgaagcattttgtcaatacatagcagagaagtgcaagtgtatcgtgatttctgtaggatatcgacttgcacctgaacacaaatatcctgctgcattgatggatacaattgatgcagtactctggacagttgaacatatttcatcctacggaggagacatcaacagactgtccatcggcggtgaatcttcaggtgcgaatttggcagcggctgcttgtattgctcttcaccaaaaagtctctatccatcatcaatttttgattaatccagtcacaaattattcgtttaattctccttcctatcttgagaattatcaatttaatttaacagctgagaaaatgaaatggttttggcaccattacttgaaaacctcaaatgatggtaaggaaccttttgcttcccctttacaagtaggagatcagatagctgcaaaccttcctcaagctttaatcgtcactgttgaatatgatcctttaagaagtgagggagaagcttatgcgaataaactaaaaagaaatggtgtaaacgttacccaccttcagtatgaaaaactagttcatagtttcatcaatatgattggagaagttaacgtagctaaaaaggctgtcgatgatatgctttttcatatgaaacaatttatttacgcggaagaagcacataattcatatatgaaaccggtttaatcctttaactaaagggaaactaccatgtaatgacaagttttgttaatggagggaaatcatgaagtatcgacagttaggacaaaccgacttaaaggtaagtgaagttagttttggaacatgggcgatcggcggagcgtggggcaaaacaaatgacgcccaagctctcgaatcacttcaatatgcgatcgatgccggcgttaacttctttgatacagcagatgtatacggtgacggtcatagtgaaaaacttcttgcgaaagcgacaaaaggacaggaagataagatccatatcgcaactaaattttgtcgtgcaggagatatccatgattcagctacttactctgaagaaagtgtacgttcatactgtgaagcgagcttaaaacgattggaacgagatcagattgatctgtttcaaatccactgtccaccaattgaaatattaaaggatggagacgtatttcgagtattagataagttaaaagcagaaggaaaaatacgttattacggtgtaagtgtcgaaacagtagaagaaggattattatgtcttgaatatccaggcgtaagcacattgcaagttattttcaacctgtttagacaaaaacctctagaagagctgtttcctaaagcgtatgaacaaggcgtggggatcctcactcgggtaccacttgcaagcgggttattaactgggaagtttaagaaaaatgctaagtttgaagaagacgaccatcgtaactttaaccgaaatggagaagcctttaatgtaggagaaacctttgcagggattgaatttgaaaagggtgttgaattaagtaatgaaatcgattggattgctcgagatcgtgagagtatgacaaccgcagcgttaaaatggatccttgaacacaaggaagtctcctgtgttattcctggctttaaaaatattgaccaggtgaaacagaaccttaaagcggtagaagttcctgattttacgaaagaagagatggagaagcttaaagcgttctatgagcaagaagttcatgggctaattagaggagcttattaaatagaggaaaggagttttaaaggtgggaaagccaattgaaattgctaatattcgaattgagcaggataaaggtaaaagtcggcgagcttatatcgctgatttcaaagaacctatacactatggggtacatggtggtgttaaagacttttatcaagccacaccagaggtagaacaaccctcgaccctcgatcatattgttgcagcagctggtggctgactaaccggtacattatccggtgcgctggaggcgcgccatataccaacttatccaaataaggtatcaggaaagtttgaaggaatcattgaagcaccagatggtgttcttaaaatcacaaaaattcgctgtcattataagttatttattcctgcagacaagcgggatgcagctgaaagagctcttaatgtgtttgaacgaggatgtccagtagcacaaaccttaaaagactccgtcgcttttgaacatgattgggagattatagaagaataaacgaaaggctgatgaataaaaccattcatcagcctttcttatcgtaggtattgcattttccagaaaatttttttgagtgaccagggtgaattcgtctaatcccttaacgaataagtattagcaaactactaataaaaaatcccgtaactcaacaagttactaatggaataatacgtctattatttcagctcaacaactggttcagctagattaataaactctttcacagcaaaaggcaaatatttatttcgtttccagattagtccgagttctaagtttaaattagagtgtctaagctttaaagttttaatcctatcgttatgaattgaatacgcaattttactcggtaaaagtgcaatacccagtttcgcttctaccatttcaatcataaaatccttttgcgagctttgacatacgatgttaggataaaattcattcttcgagcattcttctagaattcgatcatataaagtgaagtcatctcgatacaaaataaagggctcatattcgagatcagcaaggtggatttcagagtacactgctaacggatgctcatcatgaacgattaacatgagtggatctttgataacctgtactgcttcaaaactactattttttaaaggtgtgttacagatcaatccaatatcaagagaaccgtcatcaacgccttgttttatcattttggaccctacttcagtaagtaggatttctactgtaggatagagtgccttaaactggctgattatctttgaaaaaaaagctgcaccgatgataggtgggatcccgattttgatttcccccttttttaattctgttatatccgatagctctgccgttagattttgaaaagcacgaagaacatgctgggcattgaccaaaacggccttaccagcatcagtcaattctaattgcttagaccgatagaaaagggggatgccaagctctgtttccagattcttgatggctttactaatcgatggttgtgacacatgaagtgtcgatgctgcttttgtaaaacttagctgtctcgccacttctgaaaaatactcaagatgacgaatctccaaacctaatcactcctactgccgcgatattttatgcaaaattctgaattataaccttagggcatactcaatatgccaaatatgtattatattaataactatttttattataagataatacataacaaaaggacagtaccaccgcgaggtcctgttatctttacaaggaggaaatacaatggaaaagtatacgaagatcggctctttacaagtagccactgaactctataactttattaatttcgatgttattccaggtacagacgtttcaagtgatcaattctggaatggattcgatgaaattgtgaaagacctctctcctaaaaataaaagactactttcaattcgtgaagaacttcaacaagaaatcaacgaatggcatcaagcaaatcctaagtacagtttcaaggaatacaaaacgtttttaacaaaattaaattatattgagaagcaaacggatgaatttacgataaccactacaaatgtggacgatgaaatagctgttcaggctggaccacaactagttgtgccagtaaacaatggacgttacgcaattaacgctgcgaacgcaagatggggaagcctttatgacgcattatatggaacagacgccattagcgacgaaaacggagcagacaaagtcggcaactataatccagttcgtggacaaaaagtaattgcgtatgcaaaacgttttcttgattcagcagtcccattaaaagaacaaagctattctgatataaagcgtttttcgatagagcaaggaatgctcaaagtgcatttttcggacaataatgaaagcgttttattaaatcaggatcaattcgtcgggtatcaggggaatgaaaataatcccgatgcaattctattgaaaaacaatgatattcaccttgaaattcaaattgacccatccaatccaatcggcaaaacggatcctgcaggtattaaagatgtatatgtagagtctgctattacaacgattatggattttgaagattcagttgctgcagtagatgccgaggataaagtaattgtatatcggaactttctcggcctaatcaaaggcgacattgttgcatccttttcaaaaggaacaaagacgatatcacgaacactgaatcctgatcgtaaatatatctccccagacggtaaagaattctcaattcgtggccgctcactcatgtttgcccgtaatgttggtcacttaatgacaacaaatgccgtactcgatcaatcaaataacgaagttccagagggcattctggatacagtcattacaggacttatcgctaagcacgacattctcaagaatggcaaatatcaaaattcatctaaaggttcaatttatatcgtaaaacctaaaatgcatggttcagaagaagtagcttttgccaatgaattatttaatcgaacagaagatttacttgcattaaagcgaaacacaatgaaaataggcgtaatggatgaagaacgtcgcacaacccttaaccttcaaaactgtattcgagaagtgaaggaacgcgttgtctttattaatactggattcctagaccgtacaggggatgaaattcatacttcaatggaagcaggtcctgttatccgtaaaaatgaaatgaagaacgccacttggttacaaagctatgagaaatctaatgtgcaacagggattgaaaacaggcttttccggtgtaggacaaatcgggaaagggatgtgggctatgccagacttgatggcagacatgttagcgcagaaaggaagccaattacaagcaggagcgaatacggcttgggtaccttcaccaactgcagctacccttcatgcccttcactaccatgaagccaatgttcctaatatccagagtgaattagcaaagactacatcaacctatcaagacgacattcttcaagtaccaatagaagaaaagaactggagtaaagaagagattcaagaagagcttgataataatgctcagggcattcttgggtacgtggttcgttgggtcgagcatggtgtaggttgttcaaaagttccggacattcgaaacattgaacttatggaagatcgcgccaccctccgtatttcaagtcaacatatggcgaattggctacatcatggcatttgtacagaagaacaggtattggaaacaatgaaacgtatggccaaagttgtagacgaacaaaatgcaagtgaccccgattatcgtgccatggctgcaaattataaagattctgttgcatttcaagcggcttgcgacctggtttttaaaggattggagcagccaagcggatatacagaacctattttgcataaacgtcgacaagaagcaaaagcaaagttgtatgccaataagtaacttatcttgcaaaagtggccatcggctacttttgcaatcttttacttaaaattatctgaaaaatctaaaaacacgtttcgacttgtctgatatgtgacttctgaaaggtggttattattctggaatttaaacgtatttcttctcaaaaaatatctgagaaagttgaagaacaaatagtgaagctaattaaagaaggcagttacaaagagggtgataagcttccgtctgtgcgtgagctttgtgattcccttgatgtaggtcgttcagcggtacgtgatgcgctgacaacactaaaagggagaggattagtagaaacaagacagggtgagggaacgtttgtgacagggttcaatcccaagcgttattttcaacatatgttgatgccccatcagaaggaattggaatctctctttcaagtaagagagattttagaaacgagcattgtcaaactagctgcagtaaatcgcaaagaacaggatctcattaccatgagaaaaacgctcaatcacatgagtgaatgtcaatatgatgaaagcggttatcatgattgtcaatttcatatggcaattgctaaagcatctggaaataacatcttacaacaattactagaatcaatctcgtccacaatggcaaaatcaatggctgatttccattgtttaattgcttcgaaacctgaactgattcatgacatccatcatcagcacgaattaatcatggatatgatcgtttgtgaggatgtttcaggtgcaaacgaagccatgttacttcacctatcctatgtaaaaaagcatatgagaaaaggattctcgattcgctctgaatttattgaaacaatttgaagggagggaagaatttggacgaacttctgattgaaggcccattgaccgaattggcaaaccgatttggcaatattacgcctcatatactatatccagagacggaagacgaagttgcaatgattttaaaggaagcaaataaagatggaaagaaactcgctattgtaagtggtggaactaaactgggatacggaggaataaagcctaattacgactttactctttctttaaagaaattaaccggtattgttgaacacacagcaggagatatgacagtaacagtaaaacctggtactaccatgcagaaccttcaacaatttttgaagcagcacaatcagatggtcccattagatccagttcactcatcagcttccactattggcggggtcgttagtgctaatgaaagtggacctaaacgcttgaaatacggggctgcacgtgatcacgtaatcggcatgcgtattgtttatcctgatggcaaaattattcgtacaggcggaaaagttgtgaaaaatgtggctggctacgatatgaacaaattgtttattggcgccatgggaactctcggagtcattacagaaatcacattaaagttacgtccattgccaaaacactcaagtatagtcacgttaagtgtgcaagaggatgcacttaatgatttaaaatcattcattatacaaattcaggactctacgattgaacctgtttctcttgaactcatcaacccaacgctatccaagaatttatttcataaagatgagtaccacttaataatcgcccttgaagatgttaaaaaagcagtcctttttcaagaagcttggattgatgaaaacaaaccaacagaagcaatgatgaacgttttagagcagactgaagacttttggacaatatttaatgagctaacaccaaacagtcaaaacgagtttcatgatacgacttctggtgttatgaaagtcggaacaaccaatatgggagtattcccactacttcaggaatgcgatcgattgaatcttgaaggtaacgtccagattcttgcacacgcaggagttggacatggcctcagtacaattatcgtctcagggttgcctgaaaacgtcgttcaatggattagatacatccagacattttctgaggaacatggtggatacggaatagtaaaacatcttcctttcgaacttaggaaacagttggaagtctggggacaacaaaaaggttctttctctttaatgaaaggaattaaacaaaagcttgatcccaaaaacacgctgaacgaacagcgttttataggagggatatagtatgagtttaaaagaaaaagaactaatgaagaattcacctccttgttcatctaacagtttaagtaattacctgtgggaggaccaccctgatgaggaaaagtgggcagattgcgtacattgtggtatgtgtcttgaatcatgtccaacatatttagagacagggcaggaacaacattcaccacgaggacgcgttcatcttattaaatctgttgctgaaggaaagcttgaagtaaatgagcaatttatggatccggtatttcagtgcctggattgccgtgcatgtacaactgcatgccctgcagatgttgatgttggtgggttgattgaagaagcacgtggtcaggtaagacaagcaatgccgttaaaaggagtaaagcgagccgtcagcagcttcttcctgaaaggtatatttcctcaccaaaatcgtctccaagcagctggcgggttattaaaattctatcaaaagagcgggcttcaaaaagcggttcgatcgactggagtcctccgtattatgcctgatcatcttgtagaaatggaagcagttatgcccgagattcaccaatcgacgcatcaaaagtataaaaatgttgatattatccctgcgaaaggaaattcgaaagcacaagttgcaatgttgaagggatgtatcatggacgtgatgtttagtgacattaaccaatcaaccatcaacgttcttacgcataacggaaatgatgttgttcttcctaaaaatcaaacgtgttgcggtgctttgcacatccacgcaggtgaccgagaaaccggaaagaaacttgccaaacaaaacattgaagcatttcaagatgcccataaagtcgtggttaacgcagcaggatgtggatgtgcattgaaggagtacccggagcttttccgacatgatccagaatggaaagcaaaagcagaagttttttctgagaaggtggaggatatttcaaaatatctctatgatacagggtatgagaaaccgcaaagtgcaatcaacaaacggattacctatcacgatgcctgtcaccttgcacatggccagggcgttcgtcatgaaccaaggcagttattaaaagatattccgggtgttgattatgttgaacagccaaatgcagatacctgttgcggcagtgccggaatatataacattacaaatcccgaaatggcttccgctgttctagaacgaaaaatggaaaatgtaccgagcgacgttgagatgatttcaatgggaaatccgggatgtatgcttcaaatggcaataggtgttcagaaatacggccgtggcggaaaaattgtacacaccgttcagttacttgattgggcctatcaagaagatggaatgaaaggagtgaaagatggtgttattggcgagaaagaagaaagcaacaatagaccctgacattcttgctctctcgaaaattgtaggagctaaatccattcttcatcataaagaagatctattatcctacgattgtgatggatttactattcataaagcgatgcctaaagctgtgatttttcccaaaaatacagaggaagtatcagctgctgtcaaatattgtgctagtcatgccatcccttttctcgctcgcggtgctggaacgggattaagtggaggagcgattcccctaaataatgaagttatcatcagccttgtgaaaatgaagaatcttttaagtgtcgattacgaaaacagaaaggcagtggttcagccaggatttgtgaacttaaaactaacaaactccatttctcataaagggtattactatgccccagatccttccagtcaatacgtttgtacaattggaggaaatgtagctgagaatgctggtggggcgcactgcctgaaatacggagtgactacgaaccatattctcggtctagaagttgtgcttccagatggagaagtgattgaaatcagtcctaacggtgttcttgatactcccggatacgatattcttggaatcctaacagggtcagaaggcacgttagggattgtcacaaaaatcaccgtccggattctcaaaaacccggaatcaaagaaaactgttctggcttattttgatcgagtggaagatggaagccatgctgtttctgacattatttcagcaggtattatacctgctgcgctcgaaatgatggaccaaaccgcgattgaaggggtggaagcaggggcttttcccgttggacacccacctgatattgaagctcttctattaatagaagtagatgggatcgctgaagggatcgctgaacaaattgaacaaatcttgtctgtttgtgagaatcatcatgttcgtgacgtcaaagtagcacgtgatgaggaggagcgcggtcgctggtgggcaaatcgaaagacaggatttggagcgatgggagccatttcaccagattaccttgttcaagacggtgttattccaagaagtaaacttcctgaagtccttaaagaaataaggaatataagcaaggagtacaaccttcgaatagctaatattttccatgcaggcgatggcaatttgcatccgcttatcctgtttgattctagaattgaaggagaaacagaaaaagcattacttgcgggtacagcatgcctgaaagcctgtgcagatgcaggaggatccattacaggtgagcatggggttgggatagagaaaaaagaagaaatgcgatttatttttagcgatgaagaacttgaagctcaaacctccatcagagacgtatttaatcccaataacttattgaatcaaggaaaacttttcccaactccaagcagatgtatggatattaaaaaggtggtcaatgaaacttcacttacaaaatcaacataaaggagctattaatatgaaatttggtagatttaattacaaggataagattcaatttggtgtaatcgaaaagaatagtgtcacgataattgaaggaaacccacttacgaattggtcctatacaagtgagaaagtctcattagatgacattgagctacttgctccaatcgcaccaaagaacatcataggaattggggcgaactacgttgataataaacaatcactccctaatcaaattcctgagatgccagtgtttttcttcaagccatcaacctcagtgattggacctagtgaacaggtaatcattccagatcaactgcacgaaataaaattcgagtctgaacttgccgtagtaattgggaaagaaactaagaatattgacaaagaacacgcacttgattatgtttttggctacactgtcggaaacgatgtaacagcacctcaatttttccatgaaaatggtcactggactcttggaaaatcattcgacacatttacgccgcttggacccgtcatcgaaacagaattagacccatatgacattcacgtaacagcgaaggtaaacggggaagtgaaacaaaacagtccaacagagtggatgattgttccgataaaagaaatgattgcttacctttcaactgttatgacattacatcctggtgacgtgatccttacaggaagtcctacaggagcgcattttgtaaaagacgaagataccgttgaatgtttcatcgaaaaaattggttctctaacgaatacgttcaagcatgcctcttctcgtgttcaggtctcccagaaataatcctgggagttcccctggatcgtgctaaaactagcttaagattttactgtcttcaaacagattacatacaactatacgagaatagacagcatcgatgaaagaaaggagaaataggtttcattaccaacaaatataactattggaggatgagcaatgagtacaggattattagcaattctttcgttactcccaattgctgcagtaggaattttcctagtagggttacgatggccagcaagtaaagcgatgccagtatcatacatcgttgcggttgtactagctctattcgtgtggaaagttccgggcgctactgttgcagcagcatcgataaatgggttagttgttgccgctactttgttatatatcatcttcggagccattctactcttgaatacactacaagaaagtggtggaataaaaacgattcgagagggctttattggtatttcacctgaccgccgcattcaagtcatcatcatcgcatggttgtttggttcatttattgaaggatctgctggtttcggcaccccggcagcagtagctgtgccgcttcttgtcggtctcggatttcctgctatggctgcagtaattgcaggtatggtgatccaaagcacacctgtttcttttggtgcagttggaacgccaattcttgtcggtgttcaatctggtcttactgctgatgctagcatcacgaatgatttccttgctcttgtaacgatggttggagggcgggtcgccattcttcatgctatcgtaggtacactcatccctttatttgttgtagcacttatgactcgtttctttggtaaaaacaaatcatttcgggaaggcattaaagtctggaaattcgctttgtttgctgctttcgctatgacgattccatacgttatagtcgcaaataccttaggtccagaatttccatcaatgatagggggattagttggactcgctattgtggtcacagctgcgaaaaaaggattcctcatgccacctccaaatgagcaatgggattttgatgataaagaaaactgggatccttcctggtcaggaagcattgaaattaaagatattgctcataaaagtggacatatgtcgatggtccgcgcgtggacaccatatattctagttggtttacttcttgtagcaactagattgaaagcgctaccattaatcgattggtttcaagcttggacggtttcaatacctaatatcttcggtactcagatttcgtcgagctttcagccgctttacttaccaggcacaatttttatacttgtctcactaatcacttttgtcattcatcaaatgaatacgactgcttatgttcgagcatggaaacactccggtaaaacgatgatagctgcttcaactgcactcgtctttactgttcctatggttcaagtattcttaaattccggaggcggaggggcaggatttgataaaatgccgctagaactcgctaacggtgttgcagctctaacaggagatttctggcctctctttgcatcattcatcggcggtatcggcgcatttattgccggtagcaatacggtgagtaacatgatgttttccttattccaatatgatgttggagctcaaataggtgtagatgcaacgtggattgtcgctctacaagctgtaggaggcgcagcagggaacatgatctgcgttcataacgtagttgctgcttctgcagttgtaggactagtaggtaaggaaggggacgttattcgaaaaacacttattccatttgtttattatgcaacgatggctggtgcactcggttattcaattgtgtggacttctgaaaagggaatatttaatctcggaacgattatcaccactcttattggagctgcagcgatttatatcattgcaacgaatcgttctaaaagtaccgctattgccgttgataataacccttataaatccattaaataatcaaaagcacctgccactttacatggcaggtgcttctgtatactatgaagcttttgattcaatgaatgattctttttcatgctttcttatggatgaagcatgaaaaacgagatttaaaagaatagccattacacttccagcaacgatcccattatcagtaagaatttgaatgctagctggcagctgttcgaacacggaaggggcagctgtaacaccaagaccaatgccaattgaacaggctataataaataagttttcttgtgagttaaaatcaactcgcgttagcatttttatgccatatgccattaccattccaaacatgacaagcatcgctgctccaagaacaggtgcaggaataatagttgtaacggctccaatttttggaacaagaccaagaacaactagcattccaccaacgaggtagatgacctgttttttcttgattcctgagagctggattaaacccacattttgagagtatgtggtgtaagggaaagcattaaatattgcccctagaacaatcgcagctccttcagcccggtatccctttttcacatcttgctctgaaatctcctgttcacaaatatcacttaaagcaaagtaaacacctgtagattctacgaggcttaccagaacaacaaggatcattgttaatatagctgtaagttcgaaggttggcacaccaaaatgaagaggttcaatgaggtgaaaccaggaagcatttttaacaggagctagatcaaccaaccccataaaactggctacaatcgtccctactacaagacctattaatatagcgatagatctaacaaatccatttgatagccttgttaacacaataatgaaaagtagcgtccctagtgcaagcgatatgttttgcaaagaaccatagtctccagcgccttctccacctgccatatttcccatcgcaacaggaataagagttatcccaataactgtaacgactgatccggttacaactggagggaagaatgcgattaatttactaaacacaggggaaatcaggataacaaatattcccgctgctaaaatagctccatagatagctgttatcccgtattgtcccccaattgcaatcattggtccgactgcagtgaacgtacaaccaagaaccaccggtaagccaatgccaaagaaacggttcttccaaacttgtaaaatagtagcgattccacacataaagatatcaattgaaacaagataagttaggtcacttccacttagcccaagtgcgcctccaacaattagagggacaacaacagcacccgcatacatggcgagaacatgttgtatacctagagaagtgtatttaaatagattcatacataatctcctcttcagtaaacgttaccttgccagcttccaattcggatatcattgctagtgactcaactcgataacccttttctcgtaatcgttttccgccatcctgaaatgctttttcaattagaattccaatccctgctgtagttgctccagctttagcaacaacttccaataaaccttcagcagcttgtccattcgctaaaaaatcgtcaataaggagaacatgatcctgctcagatagaaatttactagaaatagagattgtattggactcttgttttgtataagagtagactaccgccgttaataaatcttcgttaagagtaagcgactttttctttcgagcaaaaatcaaagggacatttaatgttaaggcagtgaatactgctggtgctatccctgaagattctaatgttacaacttttgtcacccctaaattagcaaatcgattcgcaaaaacttctccaatttctttcattaaatgagggtctacctgatgatttagaaaagtatccacctttaaaacgctatcagatagtgcaataccctcttgtttaattttcttttttaaattatccatgttgaatcctcctttaatacaaaaacccgaagaacatcttacccactaaagagtgagcaaaatattcctcgggcctgcagaaagaagcatttctggcacagaagtttgctcactcatagtcggatcatttacggtgaaccggtagaaacttgcaagccatattcttgcggttatatgagtgatgatgttcataaggttatgaatggtattataaaccaacaccaaaatcgttgtaaagaaaaacttaacgatactagattgagaatacatttatgttcgtgttttacgtaatttatctaaactaactgctaattattacaattccatccattagaaagaaggccggattcattgaatccggcctttgttaggtttaatttaaccctttgttatatcagaaagaagtttgtaagacttctttcttttctcatggtcatagattgatgaaataaccatcatttcatccgcttgagtctcatcaaggaactcttgcatttttctcttaacagtttccggaccacccacaatagaagtggcgagctgttgatgaagagctgctaattcatattcactagcatttaatttctcaactggcggctgcattggtgcttcgtgattacgaattaagtttaggaattgctgctgtagtgtagtggcaaggaaatttgcctcttcatctgtatctgctgcaatcacgttaacgcctaccattgcatacggagcatccaatacttttgagggcttgaaatggtttcggtaagtttccattgcattaattgtgttttgtggtgaaaagtggctggcgaatgaatagggaagaccgagttccccagctaattgagcgctatataaacttgatccaagtagccaaattggaatatctaaaccttcaccaggtacagcacgaactggggaagtaccctggcttagagtaggatcgaagtaagatcgtagttcaccaagtagttcgggaaaatcctgtcccattgatccctgtcctcttcttaaggcgaacgcggttcgctgatcagtaccaggtgcgcgtcctagtcctagatcaattcgacctggaaataaagattcaagtgtaccaaattgctctgcgataacaagtggtgaatgatttggaagcataacaccacctgacccaacacgaagagttgaggttcctgcagccacatgaccaatgacaactgacgttgcagaacttgcgataaaaggcatattgtgatgttctgccaaccaaaaacgattgtagcctaatttttctacatgttgagctaagtctctcgatcgataaagagcgtccgaaatcgcaccaatttctttaaccggtgctaaatctagaacagaatatgaaatatcttttaattgtttttttgtttggttagacatacgttcatcttctttctttttaatagatttctcacttcaataaaaacccaattccaattctatcaggggcgtctcgtaatagaaaataatccgctcatcaacacgtatgtcagcgtgattgtttgaacatactagttactagaatcggttattaggagggaagaggatggaagagtctcgttatcgaatcatgtttacctatcggatgagaagcgttgggttcctttgtttacattgttttgatacgattgaaaaacaaatcgttactgtgcctgtttatagtggctacaatggagtggagatccatcatgattccatgaagcggtttccaaaagaattacttgaaacgcttcgtaatgaaaaagagaagattgacgatggattctattccatacgaacctgggacgttgaaaatcttggataaaaacaaatgagccgatgttgcatgtaacatcggctcatttgtttattttaaaggtatcaagttaaaacaccataatcgcaatccatccaagtacgccagaagcaatcgcataaaacaacattggccccatcgtcattcgaataatcgttccttcttttccaaccattccgacaacagaagcagctgccactacgtttaaaacacaaatcatattccctgcattagcacctaatacttgaagtgaaaggacaagttgttcattcatttgaagctgatccgctacgctaaattgaaagagtgagaacatcatattgctaaatgtcgcacttcctgaaatgaatgagccgagcgcaccgataaacggggcaacaagtggccaggcatcgccaactgcgttcgcaacaagagtcgcaagctccattggcatgctcaggagatcagaaccattaatccctgaattaataaaaatccggaccattggaaccgctgttccaagtgcaatgaccgtcccaaccattgtttttagtgaatccatcatcgtgtcttttacagctttaagtgtcattttatgcagaaagattgttactaatataacgacgataaaaatagtccctggtaagtacaatggttcaaaagaagtactgatctctgttccgagaatttcttgccagcctatcttaaccgatcggagccatccttttattggaaggaaatctaaccgcgtaagcaccaataaaatggcaacgagcaaataaggaatccaagcaagccctaacgagagagaatgatgaggtttcaagttcgtttggtttacatggttgaaatcccatggcttatccggaagaagaaagcctcttttggcagctggaatcactacggaaagaccaacaagaccaccaataatagagggaaattcaggtcctagaaaagtagccactataaaagcaggtacggtaaagctaaatccagcaaataaggcgaatttccataaagagagcccttctttccaagaatgattttcaccgaaaaagcgcgttaacatcatcactaagattaaaggaattaacgtgccgacaaaaaggtcaatcatgacagcactttgagtaacggcctgaagatactctcccattgactgactaccaatggaagctgccacttgttctgcgacggccggtccctgtcgaagcccctgatctacaccaacgataataggtgtcccaaccgctccgaatgaaacaggactactatctgcaataagcgccatcgtaacggcggaaaggggagggaacccaagagctactagaagcggagctccaattgcagctggcgtcccaaaccctgctgctccttcaataaatgcaccaaacaaccaggcaataataatgagctgaacccgacggtccatcgatatgcccataaatcccgctcgaattgcatcaatcgctccactgtttcgtaacgtatttaaaagcagaatcgctccaaatacaatccaaataatcgataatgcaatgatcagcccttccatagaagctgccacaatttgtataactggtattttccaaacgaaaaaagctacgactgcagtaagtagtaaacttcctggcatggcagtagtagccggaaggcgtagtaggacgagcaagataaataccgcaagaatcggcgttaatgccgaaaaaagttggagcccattcatttttctcaccttttctacgaggttaatgtgatctctttcacatatagcttatctaaaatcacctaaatattaagtgacaaacatcacacttcaagcaaactgctaaatgaaaatctgttaaaatagctttgaagcaataatgaaggagctgagattatgcttaaaaaagtcgattactttttctatcctgttgacgttacccaacctaccggggcagaagtgacgtattattgggaaattagcgtggcggaatacgaaggaaaaatctatgcttacgcgaaggcggacgaatttggaagaaaaattcgctggcatcaaagtgatcagcctgataaagaaagtgctcttgctgtcatccaagaaaaatgcaaaacgcaaagcaagtaagaaaaaagctagcgacattcgctagctttttttgcacatcgtaacctacccaggttattcattttggcatgcgttcggtacattcagggtacgatgaagaaaaatggccaacaagataggatgatgaacgcatgaaccagaaaatcataatccttagcacacttttattagcgcatattctcttgtttttaagctttgttcactatccagaaacgttttggccggtttttactgtcacactagcgattttaatcttcctaagtgtgaaaacagggacactttcgtttcaaaaaataacaattagcaactggctatatatcctgattagcgccatcttgctttatgcgatttcatatattggaatagaaggaatcaagtggatttatccctcattatttgaggacatggaacgcttttacgatgttgtggaaccagttaaagcttggcattttattagtcttattctaatcgtcattccaggagaagagatttattggagagggtacatccagcaacaattgaaacggtacaaaaagggagacaccattatcattgcgagcattttatatgcgacagcgcatttatactctgatgcctatttattagtagcagcagctattggaggtggaatcgcctggggatggctatacgaaaaaacaaaaaatttttgggtcccgctcctatcccatattcttttcgatcttcttattctcgtttttattccgttactgtaaggagcaaacgacttttcctaatagggaaggtcgttttcttttatgaacattttccctaattcctgcaaatgatgtcactattctagactaagcggttgcgacttggttatacttctagtagtattagaatgaatggctaagaattgaaaagagggttataaatgaaagaatcaatatacggattaacgtttgatcagctaactgaatggttgctagaacgtggtcacaaaaaattccgtgcctcccaagtttgggattggctctataaaaaacgtgttaaagaattttctcaaatgaataacgtaaataaagactgtatcaaacttttggaagagaattttgctatccagacattaactcaagaaatcaagcaggaatcttctgacggtacgattaagttcttgttcaaattacaagacggaaacgttattgaaacggtactcatgcgtttccattatggtcaatcggtctgtgtgacaacacaagtaggttgtaatatcggttgttccttctgtgcaagtggacttcttaagaagagccgtgaccttacaagtggagaaattgttgagcaaattatgaacgttcagcacgcacttgatgaaaaagctaatgaagagcgcgtaagtcacattgttattatgggaattggtgaaccatttgataactacgataatatgatggacttccttcatattgttaattctcaaaaaggtctttgcattggcgctcgccatataacagtttctacaagtggacttgcgaagcaaatttacgattttgcgaatgaagatcttcaagtgaaccttgcgatctcacttcacgcacctaatgatgagcttcgaaccaagattatgaaaatcaacaaagcttatccactcggaaaactaatgcctgcaattgattactatcttgagaaaaccaaccgcagaattacgtttgagtatatcatgttgagagatgtcaatgatcacgtagaagaagcgaaacaactcgccaatctactagctgataagcgccatctttcatacgtaaacttgattccatataatcccgttgatgatcactcttatcagcgtagtgaaaaagaatcgatccttgcgttctatgatacgcttaaaaagaacggcattaactgcgtcatccgtcatgagaacggaacagacattgatgctgcttgcggtcagctccgtagtaagcaagtaaagaaactagaaaatgcaggaaaatagcacaattagcaagacgcttaccagaaatggtggcgtctttttatatgcaaaggtaatcacaccaaccatttttaaatgcatacactgaaaacaagctagcttgagttcaacttgtgagtaaggagacaaaatatgaaagggttaatgattgtttttagtttactatgcatctggattggatctggattatacacggattatcaacgtgaaagcctaccttttgagttaatgggggaagatacaagcataaagtctggatataacgatattcatatttttagagaaaataatcaaattactaagcttgaggtgttcgatcaaactagagaaagggtaaaagtatatcaaatagatgatttaaaggaactatacccctcagcttcttatgtaaaaggagaagtgaaagaaggaaaactctatcttttatacgatgaaggcggaaaagttgtttccaaaagagttgtggttggtgccagaggatctctatcattcatgcctgaaagaaaatgaattttgtcaacaaatcgccaattcgttttcaggattggcttttcttcttataagaattaagttgatctggtcaccataacagcaatacctgttataatggcgttactattgcatagagagggatttatatgacaaagagccttacgaactctgagagagatcaattactgcaagatcttacatttgaccaacaatcatatcttatgaatactcttaaacgaggtaaaaaaacagcttttgccaatgtgattgctaaaagtaaaggaagaattattccaagcggcgcaaccgatgaagaaattgggatgttgcttgacgattggatattagacgattacctggatgcaggtgttgtttcagaagatgtaaagtgtgagtgtggtcgtgcattacgctatcaatatattgtacgccatgtaaaaacaggtgaaatgcgtcgttttgggattaatcattttgaagaacacacaggtttacccgctaccatcgtgaaagaagtcgtacaaggtttcacgaaaattgattatgagttggatgaactcttattaaaaaggcaaaatggctctcctacatatgacatccctgaaggtttgaacctaccagcagatatcgagcagccactttccttacaacttccgttacttgatcgacaagaacgacggttaaacagtttgatcagggcttaccgtgaagaaaaagaagcacttcaaagaggcagcaatacgttagaggctgtagatatcccgacacagaaaaaagaagacttgaaagttaaagaggcgttacctaaagaggagttacaaggttcttttgatttgttcgccgaagaaactcaagaacctttaccagaaaagacaagcgagaaaccgaaagaaacttattttgtgggagacctttcgtttacaacccaggaatcggtagacggctatattcaacaaggtacagagagtgccttgatgatttgcgagctcctaatcaaagaaggaaaagttcaagacaagcgctactcgacaaagaaaccgaaaatttactatgcagtttgcacttatctcgattcatttgtggcatcgggatccatgtctgttgagccgcttggacgtgaagatcgcatctatcgattaaaaagcgggcaatcctcctgatatttcataatcatcagataaatcattgacatttcattataccaggtctataatttcaaacatgttcaaaaattaaatcaatactcttatcaagagtggcggagggaataggccctatgatgcccggcaacctttcaactttagttgaagctggtgccaaatcctacagatgttgtcatctggaagataagaggaggatactgttagcaatccctcttcttattttttaagaagagggattttttattttacagagaataaggagctgttacacatgaaaagaacacttgaacaacgcctgcaagagggcccagtcatttgcggagaaggatatctgtttgaattggaacgacgtggttatctccaagcaggatcattcgtgccagaagttgcactagataatcctgaagctcttaaacaaacctatcgtgattatatgcttgcaggatctgatgtcgtgctagcttttacgtataatggccaccgagagaaaatgagaattatcggaaaagaagacttgctagagccactcaatcgacaagcaattcgcctcgctaaagaggtagcgaaggaacatcctgatgaagaagctcttgtagcaggaaatatatccaatacgaatctctttgatcctgaagatgaaaatagtaaagaacaaatacggtctatgttcgccgagatggtaaaatggagtaaagaagaaggcgttgatttcattaatggggaaacattttattattacgaagaagcgaaaatagccttagaagaaattcaaaaacaagatcttcaagcagttattacacttggacttatgagtgaaaacattttaagagacggctataccgttgaggaagcttgccggttgttagaagaacaaggagcgctagttgttggtatgaactgttttcgaggacctgctacaatgcagccatacatcgagaaaattagacagtctgttactggatatgttggcgcacttccaattccttatcggacaacagaagaacatccaacattttttaacttacctgatggcggatgtgcctgtacattgccaacagagacaacctttccaacatctctagatccactttattgtaaccgttatgaattagcagaatgggcaaaagaagcaaaaagcgtaggcgtgaattattttggactatgctgtggtgcttctccaagcatgttgagagaagtcgctgaaacagtaggtagaacagcggtaaattcaatctactctccaaatatggaaaaacatttcctgtttggctcagatgaatcattaaagaaaaacaatactgcatatcgtgagaaggcataaacgatgacaacggagaggacaacctctccgttttttattgcaaaaagaatatgcctttaacgtattggcaataacgataaaaagaaagtgaaaatggaacaaatacagatatgtctgcatgtaataaaacatcaatacattttacgattgatcccggcccattttttgttataaaagcagctttacgcaatgaaaaatcttgctttttatatctttagcgtaaaattcatttaaaaatagtagcttcttttgtcaaaatgatcatattgagacatcagttgtgttattattttaaatgtgtttgaatatgtgacacaacgaaactctaatgaaatcataacaaaaagaacttgttttataagcgaggtagcctatggataatcaaaatgtaataactgaactccgctcgattttgccagaagcggaattgaaaataaatgagcctttaaatgcccacacatatactaggatgggtggatgtgctgatgttcttgtcttccctaaaacaattgaagatgcaagagcagcggtagaatatgcttatcaaaaaaactatcctttaacgatactcggtaaaggttcgaatgtaattattcaagatggcggtattcgcggcattgtcttgaatctatcttctctaaaatcgattgataaaacagacaaaaaagttattgctcaagcaggcgcacgcattattgatgcatctgaatttgcgcgtgattgcaaactaagcggtcttgagtttgcatgtggtatacctggctctgttggaggagctgtatatatgaatgcaggagcatacggtggagaaatagccgattgtctcgagagtgttctcgctgtaacgaaagaaggaaagttaatcaaattaaccgctgatgaacttgatttatcttatcgtcacagtaacgtagaagaaaaaggtttgcttgttttagaagcaaccttcgctctaaaagatggcgactataatgaaatcaaagagatcatggatgacctaactgagaagcgcgaaacgaaacagccgctagaatacccttcttgtggtagtgtgttcaagcgtcctcctggcctatttgcaggtaaattgattcaggactctgagctacaaggtacacgtatcggtggggcggaggtttctaaaaagcatgctggctttattgtaaatatcgataatgccacggcaacagactatttggatgtgattcatcacgttcaaagaacggtaaaagaaaagtttgatgttgagcttgaacgtgaagtacgcgttattggcgaaccgcctgagcaagcataaagagaagccagccactcaattgagcggctggctttttgtgatgtattgaagatgaacaacttttgataatactgtgaacaaacaaaatctgcacaataagtgcacaattaacagataaagtaggatggtaaatgaaaccaatcataggagggtatttatgaaaaccaaaaaagttatattaggattaggattatcactatcacttattcttgcagcatgcggaaacaataacgagggcataaaccaggagtccggaaacaatcaatcgacctctaactcttcagcaaactccgagagtcacatggaagagatggaacactccggctcttcagaagtacctgaagggttaaaaagggctgaaaaccctacatatccagaaagcagtaaagcaatcattgaaacagatcatatgaaaggaatgaaaggtgcagaagccacgatctcaggagcttttgaaactacctcatatgttgtttcatatatgcctacgaatggcggagaacctgtagaaaatcacaaatgggtgatccatgaggaacttgatcaacctgataatgcgcctttagcacccggcacggaagtaacacttaatgcttcccatatgaaagggatggaaggagcaaatgcaacaattgaatcagccaaccaaactactgtttatatgatagactatatgccgacaaccggaggcgaaaaggtaaccaatcataaatgggtaacagaagatgaattatctcctattgagcaataaagtttcatagaagctgcgcaatagcgactgaataagacaacacataaaggatgaaatgctgtgaagaaacattggatgataatttttggggcactgcttcttattattgcaggatgtcaggaagaaaactcaaaaccagtagaaagcaatgatggggtaaaggaaacccaaaagaaagaaaaagaaacggcatcattatcagaatcgagcttttataaaccgacttcacggaagcaaattaatcatgtacatggtgtcgggtatccaggcaatcaacatgaattattcgtggcgactcatcttggaccgcttatctatcttgatggaacctggtatgaagctgaagcaaacaacaatgactatatgggcttccaggcagtgtctgatggtttttatagtagtggacaccccggcgaaggatcagatttaccaaatccgctcggattaatcaaaagtactgatagaggaaagacgctagagcagctaggttttcaaggagaatctgactttcactatttagcggtaggctatgaaacacatagcatttatgctgtaaatcaacagaaaaacagcgaaatggacataggggtttattatagtgaggatgcaagtgattggaatcaagtacaactaaaggggattcctaatcaaattaatgggatttttgctcaccctagtgatgcaaacgtcgtagccattacttcgccaaagggactttatctttcggaggatcaaggacagtcatttacaccaattacagaggacgtctcaattacctcgatggtctttcttaaagaccgtatcatcttcgccaaacaaggagcaactagccaacttgtgtcccttaagaacggagaagaaacgatcatttctatgcccaacaaaattgaagaagcgattgattatctcgcggtgaatccacaaaatgagaatgagatttcttttcatacatctgatggtagtctctatcaaacgaaagatgccggggaatcctgggtcgccttaatcgatcagggtaaattgaactagttgatgttgtatacttaaactttgaatattaccctctaattatccagaatttgtgcagatttaatgaaatttacattttaacaactttatttcggattcacgtttattatcaagcaaataggaaaatatgacagtgtattacattattaaggaggaatttaatcatgtcacatgaaaagtacggttcaatgattcaaacacttcacgaatgtatgacagcatgcaaccattgctatgacgcttgcttgaaagaagaggatgtcaaaatgatggctgagtgtattcgtttggacagagagtgtgctgacatctgtggatttcttgaacaagcacttgttagaggaaccccatttgcgtctgaacttgcacaagcatgtgctactatttgtgaggcatgtggaaacgagtgtaaaaagcacgatcacaaacactgtcaagattgtgcagagtcatgctttaaatgtgcagaagagtgtaagaaattagcagcataatcgcataattagtgtagaagtctgttgaatcattagcaggcttctttttttttgccaccaatttgttcatctttaaacaaagcagacaagctgcacactttctcgatataatactgatagaatagctgtggataaggagagagacatgagatttaagagaaaaagtaaattagctacaaaattaggtctgttttttcttacaagcatcttactccttgaggggattttattcatggtgctatacttcggctttttaaatgagcgaatcatggctgaaactgatgccctactagcacggggaaacagccacagagatgttctagaaaaacattttgatcgtgaaacaatggagcacgttgctctaatggaatctgaagctgaaactcaagtaattattacagatgaaaggaatggcgttctcgttcattcgaatactgtaacttctatgatcaaaacaaccctttcttcatcatcctctcttccagtatcgggaactatcgtggaaggtgattggggtaatgaaccttatgttatgaccggttctcctatcgttgttaatgatgagcttgttggaaatgtctacatgattctcgatacaaaaagtattcgcgaagtgcgcgatcatttaacaacccaatttttgatcattagtggactcgcactctttctaaccgttattacgattatttatctttcaagagtgattacacgtccattgattgaaatgaaagtagcaacgcaacaaatgagcagaggggatcataatgtctccttaaaagtcgatcgaaacgacgaattaggggaattagcgaacgggattcaaagcttatcagatgatttactacgattaaaaaacgatcgtagtgattttctagcgaacattgctcatgaactaagaacacctttaacttatctgaatggttacgcaaacatcgctcagcgagaagggttatcttctacagagagaaatacttacctttcaattattaaagaagaatcagagaacttaacttctctcgttcgagatttgtttgatatggctaaaatggaccaacaaggatttgtgattaatcgagacgaagtcgaattgtgttcgttgattcatcaggtaagagagaaagtaagtcctgcttttgaggataaggggattgatcttatagtgtcctgtcagaataaaatccatctcaatattgattctacaaggttttctcaagtgattttaaaccttttggataatgctttgcattatagtgagtcaggaaaaacggtactcatcgaagctcactcttttcaaagcgaagtgattgttaaagtaattgacgaaggagaaggaattcctgagaaggatttgcctttcatctttgaacgtctctaccgggttgataaatcacgttcaagaaagtacggaggttctggacttggtcttgctattgctaaagaaattatcgagaagcatggaggtaggataaaggcggaaagtcaaaaaggaaaaggaacaacgatcaccattgttttgttaggagttgaataacgtgaaaaatgtgctgattgtagacgatgaagagcggatggtagagctaatctctctttatttaaaaccacatgggtacaccatttatcaagcatatacaggcatagaagcactacatagattgactgaatacaaaatagatctcgttttgttagatataatgatgcccgacatggacggctttgcaacgtgtgaagaaatacgaaatcaatcagaggtgccaattatcatgttaacagcaagagagcagaatgaagatattgttaaaggattcaagctaggcgcagatgattacatcacaaaaccgtttgacgaacgtgttctccttgctagaatggaagctttggctcgacgcgtaaaacaaataaatcaaaatcaagtgattttaaaagggctaacgtgggatgcagacaaacatctcgtatcatattatagtgtgcctattcctatgactcccattgaatttaagttgcttggcctattcttaaaaaatcccgaaaaagtctttagccgagagcatctgattcagctgatttggggatttgaatcaaacacagaaggacgcacgattgattcacatattcgaaatttacgtgataagtgtagagcggttaactttaatatcgatgagtttttggtgaccatttggggagtaggctataaatggaaaaaatcctaatcatcctaacgcaagcagtcatttgtagtttgttcacattttcagtatcaatgctttacatacaataataattatcaaatagcataatgaagtctatttggcaaaacgaaccagtatattaggcgaaagttgacttaaactaatccgtgtggctaatgattagtaacacgtcttttaacttttacctaaggaagtgacatgaagtgaattataaaaagcgcaacacccaaaaaggaaaaggcaaaaccgctactgttatggcgttaagtgctcttggtggagcggcagcctatgcccttaccaatcgcatgcaaaacggcggttttggtggcatgcagcagcattcacagcaaaactcctcacatcaggtgcaatcgcattctcaacatcaaaatcctgaatccttgaagcaaatggcatccgctcaaggaatcgataatgatgcgatcgcagaattcacaaatgccataaaagacgatttgcgataagtgatgcactcccaaacgggggtgcttttctttaaaacttaaatcgcattgcctaaacacctcagaataagctacatatactaaagcggaaatcacacgatgataaccatttcaccttaagaacaatttcgtgatcgtacggatgaaaacatttatgattaagaagacacattatttgcatattctctaattagatggaatcacccatatctttttcttaatctgatccgttatagggatgagagggcataaggagtgataggatgcatacggagatcgatgatgaatattgcaatcagaagcaactggaagaaatgattactaagctttatcgttattgtcaccatctgacccaaaacaagtgggatggagaagaaattgctcaagagacgatttataaagcgttaaaacactaccggaatgaaaagtggagtaatgcccttctgaaaaagatggcctatcatcagtgggttgatcgcattcgaaagcgtgacaaagaagcgctattttctgaaattgacttgcaagatgacacagccgctgacaaagaattgtgctcagaatggctagagaagcttttgaaacaactaaccccaaagcagttcatcacttttgtattgaaagaagcctttcaatacaaaatatccgaaattgccgttcttcttaatatgtcagataccggtgtcaaagcattgttgaacagaagccgcttaaaaatgaaaaagctatccgacacaggggttgattctttttggtctgaatccatccaagagtcgtttctacacactatagttcattccattcatacgcaggatccaagtgagctaattaaaatgcttccaatccttctcaatcctaaggtttcaacattcaaaacaacgtatgcttcatcttctaacgtcctctcactagctgcataataaacgcgattagggaggaaatgttgtgaatataccttatgtcatcgagcaatctagtcgaggtgagcgatcgtacgacatttactcaaggttgttaaaggatcggatcatcatggttagtgatgaaattaatgacgctatggcaaacagtatcgttgcacagctattatatttagcagcggatgctcctgaaaaggatatctcactctatattaatagccctggtggatccacgtcagctggatttgcaatcttcgatacgatgcactacattgcgccagatgtgaaaaccatttgtaccggcatggctgcctcatttggagcgatgttgttacttgcagggacaaaaggaaaacgatatgctctgccaaatagcgaaatcatgattcaccagcctttaggtggggctcgtggccaagcaactgatttagaaatctccgccaagcgcattcttaaactaagacagcatattaatcgcatcattgcagagaaaacgaatcaatctcttgataaagtggcattagatacggatcgtgattattttatgagtgctcaagaagcaaaagagtatgggattattgacgaaatcatccaaaaagcaaaatagatagatggtctaagggacgggaaaccgttcctttttcattttgcaaaaggtcagcaagtctctatgtagaataaataaattgaatgtaatcgtaataaatgaaaaggagtgttcaaatgatcaatcaaatcggtcaaattatgctatacgtggataaccaggatgaggcattagcattttggacagaaaaagttggatttcatcatattgcagaggaaaacaataacgggggaatgagatggatcgagatagcgccaactttggaaggagcaacaagcattgtccttcatgataaagcgtttatagcgaagatggagcctgagttaaatctcagtacaccatcccttatgttttacacgaatgatttagatcgtttatacgaaagttttgagagtaaaaaaataaccgttggggaaattgtgtcgatgcctacaggccgcgtttttaactttgcagatcctgaggaacattactttgcggtaatggaaaagaacaaggcataaaaaagactgactttttttatataggggtatctgaacatcatcattcatttgatggtgttttttcacgttaaatccataactatgatgatgataaaatttcagaattattttaaaagaactagaaatgaagtaaatcattcattataatgaatgaaaagaagtattaacttcataaatgaaaggagcagctatgaaccagctatccattaatcaaatgatcaaacagcattatccttccctttctaccggtcaaaaaaaagttgcagagtggctcacccaaaatcatgaggaaggagcactgctaaccgcttttcaaatgggaaggaaagtgggagtcagtgaaaccactgtcattcgcttctcctatgcacttggatttaaaggatattctgagatgcaggaatccgttcgaactcattggttaggaaaaactagaaccaaacaagaagggcattcttcagatgtacaggaagtaacggaacacaccctttttaacgatattgtgaaagaagaaacgtctgtcctacagcaattgttaacccaaatagacatagacgagatctggaaagtgattgatcgtctcattgaagcgaaatccgtttacattgctggctttggaagttcgtacggagcggcatactggctgcattataacctgaagcaattaagggagggggttagtctttcgaattcaagtggcttctcacctgaagatctatgtgatcttacccaagattccgttgtctttcttttttcatttccccggtatcgaaaagaagcgattgagcttgctacatggtcacaacaacaattgattcctgtcatatcaattacaaatcgccatttatctcccataggctctctttcgacacttaccttaacaacggaggagaagatggagtcaggtcatcattccatttcttctgtcattagtcttttagaaatgatcctaaaaggaatacacttcaaagatcgtgatcgtattagttctcgtcaacaaaagttagaacagctttacagtaaacaaagctggtttgtcgaatgaaatgataaggaaaaggtggaatgttcatgaacggattgccaaatcaaaaagaaaacatcgaggctacttcttttgaaacaaaggatattttaacatttttaatcccatccataattggaattctattgtttattgtccctattaaggaggatggaggaatcaccattcctgttgcgtttttggctggattaatcaatgattccatcggtgcccttatcccacccataaccgtattcatcatgggtgcttcaacaatcggttcgtttattgcaataactatgaaaccttcatttataacaaaaagaactggtttacataccttacttcacgtaagccctttttggttattcgctcgattactcgggaccgtatttgcggcaatgacgctttttaagctaggacctgaaatgattcactctgaaaacacaggtggacttttaatctatgatttaattcccattctattttcaacgtttttcctagcgggtttattactgccacttcttttaaatttcgggttactcgagttttttggagcactgcttattaaaatcatgagaccgctcttcacattaccaggtcgatcatcgcttgattgccttgcttcatgggtaggtgacgggacgatcggtgtccttctgacaacaaagcaatatgaagaaggctattacacaaaacgagaagcagccgtcatcgcgactactttttcagttgtttcgattacatttaccattgtcattattacttatttaaatttagaacagtattttctccattactacgcaacaatcattattgctggtctagtagcagctcttattatgccacgcataccgccattgtctcgaaaagcaaacagagggtatgagcaaacagaattgaagaaagaaacaggaattcctaaaaatgtttcatcagcgaagtggggatttcaacaagctgtttcaaaagctcaaaagaacaagggaccgttgagtgtaataaaagaaggaactcaaaatgtattagacatgtggttaggtgttttaccgattgttatggcgattggtacgatcgctttaattactgctgaattcaccccattcttttcatatttaggaaagccgtttgaacctattttaacgctaatgcacgtaccagaagcaggagaagctgcacaaaccatggttgtcggatttgcagatatgtttctacctgccgtaattggtagcggcattgaaagtgaattaactcgctttatcatcgcctgtgtttcggttacgcaattaatttacatgtcagagatgggtggattgcttcttggttcgaaacttccgattagcattttcgatttaatgattatttttctcattcgtacatgcattacattgccgatcgttgttggtatcgcacacttaatcttttaagagaaaggagcattctagtggagtttgtagatgagcctcatgatgcaatcttaaaaacctatgaagaacttcatgatctagctgaagcaagctggcaagaagagaaaactgcacagtatttaaaggaaaagctatcgcgcgccgggtatcatattcaaacatttgaaggtcatttcggttttgtggcagagtttaatcgtaaaagcgctcaggtcattgcgcttcgtgccgatatggatgcattagttcaagaagtggagggcgttgtaaaaccgaaccattcatgtgggcatgacgcacatagtacgatggtattgtttgctgcgctttcccttatcaaacaaccaatgaagcataccattcggtttatttttcaaccagcagaagaaacggctgaaggggcattgaaaatgatcgaggagcaggtgctaaaagatgttgtctttctcggaggtattcacttacgtccggcaatggaaatccctctaggaaaagcagcccctgttatttctcatggatcaacaacgagtataaagggatggattgaaggtgtaccttctcacgccgctcggccagaaaagggtaataacccactcgaagcagtcgcggctatgattcaagctctaaaacaaatccgtttagacgtaccagacgcttattcggtgaaaatcactgaacttcatggcggtgaagcttccaattctatcccatcgaaagcacggttcacactggatctaagagcaagatctaacgagacgatgacacaacttattgagcaaacgaatcacgtcataacgaaagtgggcgagttaacgaaaacagaaatcacttccgctgctgcagaattttcccctgccgctgtgaaacatgcacttgcaattgaccttgcgacaaaagcaataagcgccactttagggcgcgaaaacgtcgtatcaaaatgcacgtcaccaggagcggaagattttcatttctattcgttgaaacacccttcagtcgcttcaactatgattggactcggctgtaacctactccctggattgcatcatccgaacatgcactttaataaggaagccttaatggatggaacgaagattctaatccaattacttttagaagctgatcaacagaactggctagaaagaaggtagcaaaatgaatacacaaccacttatgattcgtacgcttcattccgtggaagaacttgaagaagttagacgtttagaaacaattgtatggagctttgatgactctgtacccgtcaatcaaagcatggcagtcgtaaaaaatggcggatttattttaggagccttttatgaagatcaactcatcgcatttcaatatagttttccaggatttgatggcaagaaagtctatcttgtttctcaaagtttgggaatccatccggattttcgtaaaagagggattggcgagaaattaaaggtggaacaaagaaaaacagcagccagtatgggctacgattttattacgtggacgtatgatccattagaaacggtgaacggatcgctgaatctaaataagctaggggccgttgtaaagtcgtaccttcctaacgtgtatggcctaatgaatgataacctaaacgccggaataccgactgatcgctttttagttgaatggcatacgaaagacgataagggtatgagggagtcagaaccaatccttcctcatgctcttatgacgggtggcggtgacactcgctttttccaacctgaaaaagtagatctttccatcactgcaaagaaaatgtatgtacctgtacctgggaactttcaagaaattaagaaagaaaacctcccacttgctaaagcgtggagggaacaaacaggaatcgtgtttacgcattaccttgagcagggatggtatgtaacgaatttagtaaaaagtgaaagcaatgccgatctttatttatacctcttagaaaaaggtgaatcatatgaaaattaacagcataatccttagacacataaagatggaccttttacatccttttacgacaagcgtcggaacagagcgggataaagatatcattttagttgaagccacaacgacgtctggacattcaggctggggagaatcggtagccataatggaacctatttacaatgaggaaaccgttcaaaccaattggcatatgatgatcgatcatttggttccacttctttccggtgaagaattgaaccatccagatgaagtatcagaacgtttcaagaaaattcgcggtaactataacgcaaaagcagcgatcgaatgtgcgatatgggatctttatgcgaagataaatcacattccacttgcaaaagcacttggtggtgtaaaaaagaacatagaagttggggttagtgtaggcattcaatcgtcaccagataacattttaaagcaaattgaagattacgtaaaagaggggtataagcgagttaaagtaaaaatcatgcctggttgggatgttgaaatcatcaaaatgatacgtcagcatttcccattcacaccactgatggcagatgcgaactgtgcctatacgttacaggacattgaccctctgaagaagctcgatcaatttgatttaatgatgattgagcaaccactcgcacatgatgacattattgatcatgcgaagctacagtctcaactaaaaacacctatttgcttagacgagagcattcatagtttagaagatgctagaaaggcgatagaactcggcagttgtcaaatcattaaccttaaagtagggcgtgtaggtggactgacagaatcaaagaaaattcatgagctttgtatgaagcatagtatcccgatgtggtgtggaggaatgcttgaagctggaattggacgagctcataatattgcgattacatcattaagtaacttttcacttcctggagatacggctccatcatttcattattggaagcgagatatcattaaaccggaagttgaaatgaacaagggtaacatccaagtacctgagaagccaggaatcggatatgaacctgatcgagattacattgacgaattgacgattgttaaaaagaccattcaggtgaattaatacagtacggaaagaagccacttaccctcaatagcgtaagtggcttctttaatacaaataatcattcaatatattaagcgcaatatttccaatattaaacaaaaaaggtataaaaacagtacatttaaagttaaaaatgctatttttacgggggagagaacgtttgttcctaacatagtatcaacaatatgaaataaaggatatacttcagttgcagactgaaaaggagattaaaacgatgtgcatagggggttggaatatgagtaccgattggatccctgcttatatataactttaaaaaggtggttcattaagagcgtcaaatggataaaaacattgggatagaagagaggtagcgaggttttttagtttgtttctttgattcaatattaactaagttccaaaaggaaaagttcattttgaaacaagctttctatacctaataaaacatttattggataaaagtgctcaaaattgcctataagaacatttgtttgtataatgaaaataaactcattctatttactataaggaggtcattgcatgcctaaattaaagttagagatccaagaaatcatcgtgctttatgagagtggttatagtacaactcaaataggagaaatagcgggagtttccagtagatacattcgacaactacttacagataaaggagttgagaaacggcctataggaagttggaaaagaaagtatgcatttaatgaagattactttaagtattggaataatgacatggcctatttactaggcttttttattgctgacggatatatcgcatctcaatcgcaatcagttgcctttactcaaaaaaatcctgagctacttgaagaaatcaaaatcatcatcggttcaaatcaaccattgtatcgaaataaacacactggagtgtacagtttgcttttccatagcaaagttatgaaaaatgatcttcaaacagtgtttcatattacttcagataaaagttacaatattacgtttccgaacataccaaaccaatacattcatcattttataagaggttattttgacggtgatggccatataaactacaaaggctacacagtaagctttgtaggtgcatccatagcatttatggaatcattgaaagtattgctacttaagtacggatttaatccttatatgaccgataatggtaaacatataagagtatttataaccggtagaaaatcaattaaacaatttggtgattggatttatactgataaatcactatacttaaaacgcaaatttgcagcgtttgatcaggaaaagttatcagttgatgagttgcaagatcgcaaaaggaaccgcagctaaatataataacaatgaataagaaacaaatagaggagtacaaatacacactccttttctttatttttattttagtttacatattatatattataggaagtcactaaataataaataattccgtctcaatcgttaagtaaacttaagatattgagacagaattaaaaaattatccgatttctaaaatacgtgctatttcatcacttaaatcaaaatgactaattaaataagaattaaatactttgttatcattatcatttcttgaaacgaccacattgttttcatctaacttaattctaatttcttttcctgtctttaaataaataatgaagtctgcatcatcaacctgaacacgatgatttgctaactgtgttaaatcagatccatcaagattgttaacccaattgacaaggtatgattcatcttcatttgacgtaataatctcttctttttgctgttcgcttctatgtacctgtatttcgtaaatattctgttcatcgatcttttgatgcaagctgctctcaatgcttgtggcacttgcagtgtgcgcatatttatcgtttttgtagtctatataaacttcagctgattttaggtaaccaaatgcgagaacagagaaaagtaggatggttagaagtccttttgatgcttttttcatacaaatcacccgctttccttttccagctatcacttaggtgaaacctcttctgcttcacctcttttatcataacaaaatttgaaaaaattgcactcaattatgggagtttttttataattttcttttcacttttttggtctttaatagtactattgattgattttcgaaatggcgataacagattaaaggggtaaaccattatttagcgaattagtgttataacctcatagaatctttacttgtttacgatcctgttatttatccactgattaaacgaaggagatatgctcatgccgttttttattgccgtcctccctcctcctcaagttatgaaccaaattcagtcttttcggcagaaatgggattatactgaaacctctccacctcatataacggttaaagcatctagcggtctcacagcaacggaagattgggttcctaaaattgaacagatttgccgaggatttccctcttttgaactaaagcttggcgcaccagctacatttggcacatctgtattgttcaatactgtcttatgcaaagagattattactcttcatttgttgtttgtagatgcaattaaaccatctcttcaagaacaaaaacagcactatgaagtaacggactttatcccgcatttaacaattatacaaaaatacaaacaaatgacagacgatcagttctttaatataaagcaagatgccgaacacaccttagacgagtttgaaccatttattgttccatccgttcatattttttcaatgaataagtctcatacatatacacccgtacttgagttacctctccgcccgttaaaaaaaaggaattttcttatataactataatttaaacgccctggaaattccagggcgtttaaattcgctatttttttgaattaatcgctttttccaaccgttctaatccctcttgtaacactgatctcgggcaagcaatattaatacgttcaaatcctttcccgccttctccaaaaatatagccttcgtcaagtgcgagccttgcttccccttgcacaaactgctcaagttcctcatgagacatgtcaagtttattaaagtctaaccaaacaagataagtaccctcaggttcaatcacatcgatttgcggaagtcgctcatttataaatgtcgtaaggtacgaaagatttccttgtaagtagtccataagctcatcaagccattcttccccgtggttataagccgcttctacggcagtgatcccaaatggactaggcgcaaacaaacctaatttccccatataagcgttaaatttctcccgcttttcttcatcagggataataattgtcgaaagctgcatgcctgctaggttaaacgttttgcttggtgcgatacatgtaatcgtattagctgcaatttcattagaaagagatgaaattaacgtatgctgataccccttaaaaataagatcaaagtgaatatcatcagacacgattaatacattgtgagcgaaacaaagctcagcaagcttcataagttcttcctttttccaaacccttcctacaggattatgaggattacaaagaagtagcatcttcacttccggatcgtcaagcttcatttcaagatcatgaaaatccatctcatatttgccgtttcttcttacaagtgggttatcaactacttcccgctcactcttctctaccatatctcgaaacggatagtacacaggagattggatgaccactttctctcccttttccgtatacgtattaaccgctgccgatagtgcaggcacaacacctggtgtaaatacaatccaatcctgctgaatcgaccaattatgccgtctattcaaccaaccttgaatcgcagactttgtgttttcggttggcatcgagtaaccaaatatcccatgctgaatacgtgttgtgagagcatcaatgacgggttgcggagctcggaagtccatatccgctacccacattggcaaaagatcttctttttcaaaaatggcttcagtatgatcccactttactgaatgtgtatcaaatcgattaattcgttcgtcaaatacgttcatcatgtgcctccaattgttcaatagtccatctttactttatcaaatcttctcttatctgtcagagttattgcttatgcacaacagctaaaacacttttacaaaggacagctgggtacagtgatgataaaatgagaagtaatctttatttcccatttgaaagaacggataataactgacaaataaagtgagggtttaccttatgaatacacttcaccatgcattttggagttatttctttttccgaaagaaaagcagacgaacgattaaatacattgtcttcggtggcatcgcacctgatattatttattatgtgatgtttttatacttattaatagaacgtagtattcaaaaaatcacgaatcctgaaattgacctctctgtgcattattttatccatgggttatttgaacatcctgtagttgttgtactccgccaattaggccattcgattgtcatttggttacttgcctttattctattgatgatcgttcatcgaggctttaagctgacgcctttttctgggtttgtgtggggatggttcttgcatgtcgtggttgattttttcacgcatgtaaatgatgctgtaccgattttttatccgctcagtcataccattattcctggagttgtttcttattggaaccgtgattattatggtgctgagtttagttttacacacggcctgctcctcctatctacgatcatttatcttatcctggatcgtcgacgaacaaggaaagttttaaagcaggctaaaaataaagaaattgagtcataaataggagcaggcgttgtataaacagcctgctcctttttcttatttacttaatgacgcgtttttcttcgtcactctgttgcgaattatgattggtataactgaaagtaagatgaagaccccaacagcgagcgcaataacttttggatcacctgatacgaggctgcttcctaaaaagttgtaagcaaatgtgccaggtataatcccaataagcgtaccgaaaaaaaatgaagtaaaccgtattttagataaaccagcggaataactaattaaatcaaagttaaatagcggaacgaaccgaaaaaatagaacatagaaaaatccatttttctcaagctgttcttgtagctttcgtcctttgccttgccaatctttgttggcgatagactttcctagttttctagcgacgataaatgataaagccgctcctccagttgctccgattacggtgtaaattgtaccgaacaatgatccaaacgcaagtcctcccgcaatcgataatacggacgccgggaagaaaatcaatgggcgtatcgtgtaaataaccatgtaaataattggagcaagtaaaccgaatgataaaatccaatctctgatttcttccactctaaaattaagataagatcggctgaaccaaattaagatcacgatcgttattaggattaatgcccattttaatactgccttttgacgcttcatctccccatcctttctgttgtatccttctcataaaacatacacgaaaatgttcaacagatctgtaatatggattacatcagtaaaaatagcaacctatccatcatgaaatcatcacctggttgtatagcataataatggttaggatgatgaggcaacttgttatgaaaccttctcctttcgaagaggttttcaaataaagtgggaagcgaacacgtagcggaataggataaaataattggatccctcttactgtcatgccatcgagcacaatatgacttacaatccctactaaaagaccagtttgaataagatgatcatattgaaaggtgaatgttgacgttaaccaataaataagaataataaaaaggatactgtgtgtaatcgttcgatgtccaaaaaaacggctgattcctttcgataaggctttagctcttctgccggtccatgaccctggatgacagatgtctggcagaagtccaccaaaaagacaggctccatagaaaacaatcagctctggtgcatcgagcttgtctgttatgtagtagctttgcgcggcaacacctaagcaaataccgccaatcgcatgggttttcccctccatctcattcctccttaatctgtgttttcttgtttgtttgattggaaagtgccattttagaggggtggcaatcatatgttcgcataccaattagtatatcacaaacttccatgctcatatacaaagaaaacccgctttttaggcgggttttctagattttatattggcttttggactttcttaatttccactgcatcgcccgtttcactcacatctacgacaaatgatccgttgctataccgatcatttggtcgataagttgctggatctacctctattggttctccctttttcgttcgaacgataatgagatcttgttttgttacagctgcagctccaatgacacggtgcggatttgatttcagttcacgtaacatcacaacaccacgttttgctctcgttgttatttcaaattcacttagctgcattttcttcacagcgcctcgatgagtggctaggaatatatcgtgttttgcagttggctcataaatgatcccgctcacgacgaaatcgtcatcttttaagttaatgccttttactccgctagcccgttgaccaactagactaatttcttcttctttaaatcggagtccatatccaaagtgtgtagcaaggaagacttctttccttccattagtcgtgtatacgtctatcaactcatcttcttttttcaacttaagcgccatcagtggctttgaataccgctgtgctttgtattgagaaagctctgttttcttgatcatgccctgcttcgttacaaagactaaatattgatcttctttaaactctttaatctccatggcttcgataattcgctcatcagaatcgatcgatacaatgttagcaacatgctgcccaagatctttccacctgatttcaggtagctcatgtacaggtagataaagatagcttcctttgttcgtaaatagcaatatggtgtgagttgtattgctatcaaattgacgaagaagcgtatcagtctccttcattccaaagtctttcccgttcgatgctgcatatgaacgaggacttgttctcttcacataaccatcttctgtcacggttacaatcacgtcttcagaaggaatcatcacttcaagattcactttaatatcttcaatttcgtcttctaaaacggtcatgcgatcatccgcgtatttcttgcgaatttcaagtaactcttttttaatgagattgacaagctttttctcgctaccgagtatcgtttcaagcttattaatcagctgacttagctcttccgattccttttgaagcgtcgtaatatcggtattggtcaaacggtaaagctgtaaattcacaatggcttcagcctgagcatctgtaaagtcgtattgagtcattaagttggttttagcgtcacgcttatcctttgatgaacgaatggttgcaatcacttcatccaaaatagaaattgcacgaattaagccttcgacaacatgttgacgatctttggcacgttttaaatcatactcagatcgacgaatgacaacttccttctgatgctcaatataggcctttaagatttgctttaagcccatttgcttcggtgtcttgttgtaaatcgctaccatattgtagttatacgtaatttgaagatctgtcgctttatatagatattttaaaatgccatttgcatcggcatctttttttaactcaataacgaaacgaagacccgtacggtctgtttcgtcgcggacttctgaaatgccttcaattttgcgatcaacacgaagctcatcaattttcttaacgaggttagctttattgatttcatacgggatttctgtcacaacaatttgctgccgtcctccacgcacttcttcaatttctgccttacctcgtaaaataaactttccttttcccgtctcaaatgctttccgaatgccttctgttccctgagcgattccccccgttgggaaatcaggtcctttaataacacccattagctcttgaagcgtaacgtcaggattctccatctgcataacggctgcatcaatgacctcgccaaggttatgtgggggaatatccgttgcgtaccctgctgatatcccagttgagccattgacaagcaagttaggaaaacgcgcaggcaaaacgatcggctcgttttgtgtatcgtcaaagttaggtgcaaattcaaccgtatctttatcaatatcacgaaggagttcagatgaaatcgctgctaaacgtgcttctgtataacgcatggcagcaggtggatccccatcaacacttccgttattcccatgcatctccacaagaatgttacgtaccttccaatcctgagtcattcggaccatagcgtcatacaccgatgtatctccatgtggatggtagttaccaataacgttaccaaccgttttcgctgatttccgaaacggtttttctgctgtattaccttcatgatgcattgcataaagaatacggcgttgtacaggcttcagaccgtcccttgcatcgggcagggcacggtcttgaataatgtatttactatatcgcccaaaagcgtcaccaaggacatcttcaagcggtagatctagaaatttttctgcgttagccaatgttacgcctcctcttcaataatggaaatgttttcgttctcgatgatatttgtatcttcatttaatccgaaggcgacatttgattcaatccattgtctacgcggttcgactttatctcccattaaaacggaaacgcgtcgctccgcacgagcgatatcttcaatcttcacacgaattaacgtgcggctttcgggattcatcgttgtttcccataattgatcggcgttcatttcaccaagacccttatagcgttgaatcgtatagcctttcccaacctttttcatcgcttgtttcataccttcttcatcccaggcgtactcaactacttctttctttccttttcctttactaactttgtatagaggtggaagggcaagaaagacttttccatgctccacaagctgtttcatgtagcggtagaaaaacgttaatagaagcacctgaatgtgagcgccgtcagtatcagcatcggtcatgataatgactttgtcatagtttgcatctccaatatcaaagtcaggaccaactcccgctccaatcgcatgaataatagtattaatctcttcgtttttaaaaatatcctgcaacttcgctttttctgtattgattacttttcctcgtagtggaagaattgcctgtgttcgtcgatcgcgtccttgcttagcagaaccaccagcagaatccccctcaacaaggtacagttcatttttcttcggatttcgtgaagtggccggggtaagtttaccgctaagaatggtttctttgcgtttccctttcttacccgatcgcgcatcttcacgcgcctttcttgctgcttcacgtgcctgagcggctttaattgactttttaatgagcatctcactaatggatggattctcttctagaaaatacgaaaattgcccggaaacaatcgcatcaatcgctgatcgcgcttcacttgtccctagtttacttttcgtttgaccttcgaattgaagcaattcttctggaatacggacggagacgattgctgtaaagccttctcggatgtcatttccttcaagattcttgtccttttcttttaaaagattcactttctttgcatagtcattgatcacacgcgtaatggccgttttcatacctgactcatgtgtaccaccatctttagttcggacattatttacaaaagaaaggacattttctgaaaaaccatcgttgtattgaaatgaaaaatccagttcaatgccattactctctccgttaaacgtgacaactggatgaagtgtttctttatcttcatttaaatagtcgataaacgcctcgataccggtttcataatagaagacctctttgcggtcgtgacgcttgtcatcaagttcaattttcaatccctttaacaaaaaggccgcttcacgcaggcgttcacttagcgtatcgtaattataatttaatgtactaaacatgatcggatcgggtttaaaatgaatcgtcgttcccgttttgcgtgttttcccgatgttttcaagtgttgttgctggtttcccgccattttcgaaacgctgtttaaagataaaaccatctcgatgaatcgttacttctaaccattcggaaagagcattaacgaccgaggccccaacaccgtgtaatccaccgctcgttttgtagccaccttgtccaaatttaccacctgcatggagaatggttaagatgatttctggagttggttttccgagtttgtgcataccaacaggcatcccacgaccattatcttcgatgctaacactattatcttcatataaggtaacgttgatttcatctccatggccagcaagagcttcatcaactgaattatctacgatttcataaacaagatgatgcaagcctcttgagtcagtgctcccgatatacattccagggcgctttctcaccgcttccagtccttctagaacctggattgaatcatcactatattcctgcttttgttttgttaccatgtttttcccctttcaacttgctgtatagactagcctaccatatgagaacgggtgtttctatcttttttgtacccagtccgttttttaaagcattgccagatctgattgtttttaatagccgggtagtgttttacagcctcttactgcgttcgtttcattcatatgatctctgactatcttaacaaaaggcatgctttcgcacccatttataaagctagacgttcatacattcttaacgtattaaaaaatcctgcacattggcaggagagaaaaaaacatcgaaccgtattgtaccttaatgtttattcttcatcaattgttttcacgacatgcacgttaccttcttcataaccgagtgtaacgatatgaccttcttcaaccgactcccaatcagacttatcagctaaataaggagttttattaacaataagataataataaggtttttctaccggcgcgtttgtcgcctcttctgcatcttcatttgttaattcttcatcatcttcattcatgctcgtatcttttttctgatccacttctgctgttacttgtggtttctcatatcggattagtttttcttgaacctctccagtttcataagcaaggtcctcatcttgtccatttgcaaaggccgtgcttatggcaagtacgaaacaaagcaataaaacagacagaatggttcctcttaacatgttcatatagaggctcctttcaacgtactttcgctctaagtttaccatagattttttataaagtagtacgttttcttatattctactggatcgttatgttcttaagaagggaattcaactcacaaaccattggtaattacttactccaatcaaataaagcaaacagctttctcataaattttccgaaccgatttaagttaactattcttaacttattaggtgtcaaataaccttgaatacactaattaaaacttctttttctttgaaatatgattaaatcaagttaacttcttttattttgagttaactaacaaaaaataaatgttgacacaaatgcttttttcttttacgattctttatagtgataatgaaagcgaggttcagtcatgaggaagatgaaaacaattgatttagtttacgcaggaatgtttgctgcattaatggcggtaggcgcaaatattgctcaatttctcgtagtaggcggcgtacccattactttacaaactttctttgcgattttagcaggtctattactcggtagtcggcttggatccatttccatgatcgtctacacgctggttggtcttgcaggtgctccagtatttgctcaattcacaggtggtcccggcgttttatttaaaccaacattcggatttattctatcttatattttagtagcgtatgttgcagggaaaattgttgaatcaaaatctagaccaactgtcataacgtttatgattgctagtttcactgcatttatcttgaattatgtccttggtacaaattatatgtattatgcgtacaaattttgggctgacgctcctgaaggattcacttacggtatggcatggttatggatgctggccccgctacctaaagatatcctcttatccgttgtagctgcccttatctcacctcgtatttacgctgccgtttcgaaaacatccaaacgtccacaggtagcttaataagtcattcctctattcccaatagatgaatataaatgaaccgccggtaatctaccggcggcttttttatggttaccttattcattaacggtttgctttgacttacctgaattcaagaaaagtgatacgacaaacatcagtgcaaggaatacaatgacaaggctaaatccaccttttgcaccaaatgcttcagaaacaataccgatgatataccccgcgataccaccacctataccagaagccacataaatcaaccctagtgctgtacctggattttttgaaatagttgttccaaaagcggttgcggttgggaataatgttgagaaaaacagtcccgctcccgcaaacaagtacggaacttgatttgcaaaaaagaagctaatggcgacgataatcactgaacctaatgagaatgaaatcataatcaagcgttcgttaatcttattggcaagataagcgacacctagccggccaatcataaagaaaaccgaaaataacgaaagaatggtagcgaccatatccgattttgcttcatttgaaatcccgccaagttcaagagattttaaatatggtggaaagaagtttgtgaatgaaacttcagcagatacttcgaaaatcaagaagaacattaaaaagatcatctgcgcatcttttaacataggaatgaatgctttcaaattgattttttccgcttttccatctgggaattttacggacgttacatagaaaatcacaagaatgtttagaatggcaatcgcgagatagaaatagcgccatgaagcaaactggaacatgtagtttagaagttgagggaaaatgatcataccaagtccataaatccccattgccaaattaaacatttggttttgtttctcaggataagcagcgggcacaatggcgttagatgcaacacccagcgcacccaaaccaaatccgattaacatataaaaacctagaaagaaagtgatgtttggtgcaaagcctgtccccgcaaaaccgagacccatcacaattgtagcgaagaccaccattattcttaacccttttttatcggttaaataaccgaaaattaaactagcgagcgtaaagcccagttgaaaaattaaaacaacgagtccaaattgactcatatcgagaccaatatctgtttcaactttatcgagcacaattccctttgtatttgttaccccacctgacacgaactgggtaaacaataaaataattaatgcatgaatactttttccttttgacattgtccgtaacctccaaaaattaatctatgacaggggattccacgggtattctgtcttaaaacttgcaaatattttccgacttttttatgtgagcgtttccatcaccgccataattgagatagcaagccataaaaaaagttgtagaggaaattcctctacaactcacttcattgtatacacagtgaatgtagcgataaaatagatcactacgattaaggccgatggcaacatgtaaaaaagggtactccgtttgttctttcttgtaatgctatataaaataacgagcacaactagaatagaagaaatggttgttatcacatttgatggactcgcatgctgaaaaatatttgttttaaagtagatcgcatccgtaaaggaaagtagcataatgttaaatgcgttacttccgagaagtgaacttacccccatgctatagtttcgtagtttcaacgcagtcgcaacacttacagcatcaggtaaggaggtacttgccccgacaagaaaagaccccacaaaagatgcaccaagccctgtactttctgcgattcgatcggctgtcaatgtaagaactgttcctacgatcatgattccaatagcagaaagaatgaacatcgtaagaactcttcgataagaaaattccccgtatttttcatttttccggctttttctctttactttttcttctgtttgtttatttatccatttcacaccaaaaaaatatacaagcactaagattacagagctatatccgatatgaaaaatacttgctggaagtgtgagcgataatccagcaaccacaataagcgtcatcacaatcacaagataaatatatagtttactacctagatcagtttgtcccataatctgttcacgacgataaaccatgtcgaggacagcaagagccaataggttaaataagttactcccaagcaaattacctatagctagatctggactatcaatggcaattgcggttacactcgaggttaattcaggcagagagattgcagcaccaataataattcccataaaagcagaagatgttttggttttttcactaatggcgtcgccgtacatcgcgaggcgtgttgcaacaaaatacgttgcaatggcggctaagataaatagtagaatggttagatatatattcatagacgttctccttcgaaagttcgttatcaccttcaccattaccttcgcttcccaaaactaaactattactttaagaatgtattaaaaatgtaatggttcaaaattgttgattattgatcattaaggtgcaagaattacgacgaaaaacgttggatctccatcttagttaaatcattcattaatagtcattcgctccttcattcatataaaaagaacctactctaatgagcaaggctcttatcacttttgtacgttactgaaaaaacatagaaggctccttcaggactttgtaatgttgccattcataaggtagtaattgttgatatcgtttttctaaatagcgattatcgactaggagtaaaagaccatgatccgattcagtgcgaatgagtcgcccccctgcctgttgcacacgattcatgccaggatatacgtacgtatactcgaacccgtttttcccatcttgatcaaagtaggttttcattaattggcgttcagtatcaaagtttggcaacccaactccgaccaccaccacacctgttaaacgttctccttttaaatcaattccctcagaaaaaattccacccactacagcaaatcctactaaacttgtctcacgatcagaggaaaactcgtttaaaaaatattctcgttcttcttcagtcatgccgcttttttgtatcatcgtttctgcttgagccggagcggtataagcgccataaacttcttccatgtacccatatgaaggaaaaaagaataagtaattccccggcttcgtttcaacaacattctcgagaagggaaacaagtgatggcaacgttcgttctctgtcacgatatttcgttgaaagtggtgcgatcaatacttccgcatgctcacgcgcaaatggagatggaattcgtaccgcataatcctcctctctccacccgagcatgttttgataatacgaaaaaggactgaaggttgctgagaaaaaaacgttcgctcgaaatcctttcctcattttttgaagcagattggaaggatcaaaacaaaaaagcttaattttcacctctaacttacctgcctccacataagtaataaagcgttcttcgtacagctttgcgatccgaataaagttctgcgctaaaaagtatgtttctaaaagaagctcatcacttccttgttgaagcaattccttttcacttacttgtacaaacgtatccagttgcacaataagttcctcatccacttccgacattacgagagatccattctgagttgatttccgataatcaataaacgtacggttaagcgccgctgcagctgttgaaatagcgtcgttttgctttttataagcgcgcttcagttcaagaaatggtgattttattaattcagctgaatacatttcacgtgcgcgatccacaaggttatgcgcttcatcaataagaatggtcgtttgttttttttggtcatcaattagtctttttagtgagacgcgggggtcaaataagtaattataatcacaaataaccgcgtctgctaaataagacaaatcaagggatagttcaaaagggcataaccgatgcttctgtgcatactgttcaattacgcctcgagtaataagcgtttcattgtttaaaagatcaagcattccttcgtttattcgatcgtaatatccgtctgcgaattcacaataatctttttggcagattgttttttctttaaaacagattttatctcttgctgtgatggttacggaagaaatgtgaaggcctttctgctccataagttgaaaagcttcctgtgctgtttccctcgtaatggttttcgcggtaaggtagaaaatctttttaccaaacccttcccctattgctttcataacagggaatagcgtactgatcgttttaccaatcccagtcggcgccatcgcaaacagcgtcgcttcctcctgtaccgttttatagacgcttcccgctaactttcgctgaccttctctgtatgtatcgaaaggaaacgaaagagctttacagctttcgtttcgcatcataagatgtttctgcttccacttagcaaacggggcatattgctcaattatgctcagcatgaaagctcgcagatcgcttgctgttagagtatgttggaatcgaatgatgtcatttgattctgactgaatatacgttaattgaatggtaatctgatcaaggttatatttctcaagagccatatacccataacactttgcttgggcccagtaaacggggtgcgtctgttcatttacatcagagagcggaagtgatgtggatttaatttcatcaatcatatagtcatcaccgttcattaggagaccatcgcaccgtccttcgatatgaaaggtcatttcttcgtaattcaacctagtatcaaatggcacttcttttttatccaattctccatacgttttttgaaccatctgatgaagtcgcgttccttccgtcatggttgtcgctgttcgaaaacgatgatcaatacttccacttcgaaatgcatactcaacaaccggtcttactgacacattaattatttcatccatcttatcacctattattttcgtttattcaccttcattaagagaccacctttgatccgcaaggaaacaagtggctctgcttctacagggtgatcctgcagttgttgaagatgaaagctttctcctattgttgaaaatactaattgagcctcataagtagcgaattgacttccaatacagcttcgaggtcctccaccaaatgggaaataagcaaatggggcatgcttctctttcattcggtatagagagaattgctcagggttttcaaagaatgacggattacgatgcataatgtagggactaatcaaaaacgatgaccccgatttaaattgataccccattagttcaactggtgcaatcgcttctcttaaaataacccaggctgcagggtagagtcttaacgtctctttaaaaaacagatgtgtaagatcgtgttgaccacccgattctcctgcctctttccattcccttaaaagctgttgttcaatttcctcattttttgaaagttcataccacatccatgatagcacgtttgcggttgtttcatgaccagcaataagcattgttaagatttgacttctcacttcttcactcgaaagaggagatccgtcagtatacgttgattcttgaagaagtgaaagtaaatgatcgcctttaggtgtgttttgaattagctgatctgccagttcatttaagtgattttttcctaatttgtactgtttgttccgctttgtaggcacaatctctggtgatgggaaagggagaaataagtcagatgcagatttctcgataatatgggtcaccgctgtgacaagttcgatactttctttatttgaaatatcttgaccaaacatggctttcataataattcttaacgttagcctcatcatttctgagctaatacaaatgacttctccatcatcccacccaacgataaaccgtttcgtttcttcgaggatgattgagatatattgagtcattttctctttgtgaaaagcaggcatcatcacttttcgctgccgctcatgtgctttgccttctgaggttaatagcccccgcccgatcgtttggctcaataacgaagcagagctccctttttgaaaagattctgcattcgtaacaaggatttgtttaattgcttcaggttgatgcacgacaaaagaagaagcaccgagctctacgaaatccgctatattacgggtttttgataaaaaacctaatggatccttacgaaaggagatataattctttaaacgtataccagataatttttcaacactcacgtaaaccaccactaactattttcctctattatagaaagaactggatagtacttgcaatttataacaggttacgatacaaaaaatgctctcgctaatcagcgagagcatttttcttatttaacattaatcgcccagttgccgtttctgaaaatcgcttccgttgtaccgtctgctttgacgccatcaatatcgagttctccagaacccatcataaaatcaacgtgcgtgatgctgttatttacaccatgacgatccaatgcatcatcatccatatcagctccgcctttaacactactcggataagcttttccaagtgctaaatgacaagaagcattttcgtcgtataacgtattaaagaaaataaggcctgattgagagataggcgattggtgcggaacgatcgcaatctcaccaagtctccgcgagccatcatccatgttcaatagattttcaagcgtttcatagccttcttccgctgaaaaatccacaactttaccatctttaaatgttaatgagaagttattgattaagttaccgccataacttaatggtttcgtactagaaaccgtaccattcaccccatatttatgtggtaacgtaaaaacttcttcggttggcatattcgcattaaattcaatgccctgctcagaaatggaagatccacctttccatatatgcccttcaggtagttcaatttccagatcagtaccaggtgccttataagcaagttttttgtagtttcgatcattcagaacacctcttgctttagcaagagtagcgttgtgatcattccaagctgcaattggatctgtttgatcgacacgcgtaatggtaaatatttggttccaaagcttttcaatagcatcctcttctgatgtttctgggaaaattttcgttgcccattctccattcgggattgcaacgatggaccatgtgatcttgtcgttcatcgtatacttacggaaatttttcattgcttcgccactcgctttatttgaagcagaaatgcgtgatgaagcaatcccttttaataaatcaggattggtggagcgaatcgaaagaatagcagcgccatcttcagcaaagtgatcgtacattttcacacgccattcagggacattctcaagcacatcttgggcggcattctcataccataaacggtcaagatcgtcgtcactccagttaatatgtacagtctttgcgcctatttcgtaagctttatttacaacaatacgagtaaattctgcaccttcaatagaggagttgatgacaagcatttgatctttttgtagattaacccctcttttaagagcaagttcagcatacttttctaacatgatttgttctggcaacataattcctccttcgtttccttacgactacttaaaattttaacaaaacagactctttctgtcctcttaatcctaatgatttgtttaaactattggaaagtagtgtgaaaaatgacaaatatgaatttcaatcatcaatgcgtttgcgatcataccattacggtatttggagcgggagaagtaagtgcggcaccggatagagctgtcgttgttactggagttacaactacttcagaacaagtagcagaagctcaagaagaaaacgcttccctcatttcatccattgtatcgtctcttcattctctcggtattccatcagaagatattcaaacaaccgattatcggattgaagaaaacatacgctatgaaaacaacgtgaaaatttttcttggctacaaagtaacgcaccttcttaaagtatacgtcgagccagtgagcgaaactggagcggcgatcgatgcagctgtagcttcaggagcaaacgtggtatcggatattcgttttgagttaaaagatctaacgatcgtttaccaaaaagcattagccattgcgataaaagatgcagagcagaaagctaaaacaattgcaaacacgcttcacattcccctcccacattcaccccatcagattgttgagattagttcaatgtcgcctcccccccgaatgtttagtgacgttcaagcaactcaaatccaaactggtcaattagtgataactgctcagttaaaagtgatttatcttctaaaataaaaaaagggcgttctgaacgccctaatcttacttcgtcatcgcatgttcaactttaatgcaacgatccatgatgactttaatatcatgtttcttaccatattcatacgcttcttcattcattaccccgagttgggcccagaaaacatccgccccaatatcaacggcatctttcataatatctggaagaaactcacttcgtctaaagacgttaacgatatcaacatgaccttcaatttctttcagagaatctaccgcttttactccaagcgcatcatctatcgttggattgactgggataatgtcgtaaccagcatccatcatcgcctgagataccataaaagaggtacgattagggttgttcgataaacctacaacagcaatgcgcttattcgttttcaggatgttaccaatctcttctcttgatgggttttgaatcgtcatttacgctcgcccctttgtttttttgtataagtccattataaaagatgtaagactacagcaacactatttcgctcaaaagcgagaatagagccatttttctcatgatcagctcggggcacataggggatattgtgtcctgcatccttggcctttatgtaagctgatcgagaagaaagacttgtttactcttaaattagctcggtccatacttcctcaaacgctatagcctctgacttcggtcctgcatttatttgttgttctgctgagtactcctcatctctgccgataaccgttaaagggatgtctggaaaaccttctttatttagtcgcttcgcacattgagccatacgacgaatttcagcccctacacctcagtacatagtcggactcgtttcgtggtcaattaaatgctgcacttcccgctcccataatttgaacttttccggtagctctggctgaattttcttcaataaatcttcttgcgtcatactcgcacaagcttcatacttctgtatccataatcatctgaagtcatttcatcggaatgatccacttcgtcaattcgttcgatgtttatcgacgttgagtcaattaacagaacacctaaaacggtccctaaatagcatatagcaaaatcctgtgtaatcaaaccgccataaatggccggcaagtatcactttttgagctattcctaatgaggatagaagcgcataaaactcaaggcttgcttgttcgactgtaccttctcttataacagacttacttttccataccctgctcggttataggctaaaacagtagttcattagtcatcatttcctaccactcatgaagtgagccaccaatccccgttaacaacacgattggcgtagtatgatgattagaaagaagatattttataaccccatattttgtgtatgcgacggatgaatccatccttattattccctcccggtacccactcgtaacttaaagcgattggtagatcgaacaataattagatttatttcttttttcaaaaaaatgagtcgtgtcatgagaataggtttgctataatttttcttaactaatggaagggagaagttaatatgttaaaaatactggagctaaagtcaatacacaggagggacgaatggctttaatgtaaatgactccctcctgtctttccattgtcagaacatacaatgaaagttggaggatcatgtcttctttatcaacacgtaatctgaccctattgttctggatacacttttttggaacgattagtttcttacagcccgttttaacattattttatgtaaaaaatggattaagtgaggcaaacattcttgttattttaatgtgctggagcggcgctgttttaataggagaaattccaacaggtgttttcgcagatcggtttggtgctcgagtttcttttctaacaggttccattattaaactaagtagtattggtatccttttacttgctaatagcctcgaaatgtttatgctatttagcgtattaaacggattatcggttacttttttctccggagcggacgaagcgctaatatacgagtcattaaaaaaagataataaacagcaaaaaatggatgaagctatggggaaaatccaatcagcagggtttatcgctatgatgatcgctgttctgtttggctcattttttgcaagagaccttgaactagaacagtttcagctgctgattcttttaagtatggtttcctatatcgttgaattcgttcttttgtttttcattcaggagccttctggtaaagtgagcatacctggaacttcaatcgagaatgttttggaaggtgtacgagtgataaaacaagctcctcagctattagtcatgtttttgaacgtgacgctcgtctttatcccaacagtagcggtatttcagaaatttgaccagcctcttatgatcggttctggtcttcccgtctacttcattggaccagtttacgctgtaggcgctttactcgcattcttttcatcaagaagtatcggtatgctaaatagaaagctttcttattctgttttaatgtacacgtctggccttctttccgctttcggtttgttgctagctgctctttttcaaaaccagctgtggatgattttgtgggtggtattgtttttaaggtgggttggtgctattcgctatccgatctattctcaattaagtaacaatatcatcccatctcatgtaagagcgacaacgatctcactcttgtctatacttgactcactatttgacctagtgatttttttgttattaattgcttttgctctggagggtattcaaggtatattattgggtggagcggtgatagctctgattggatcagcacttccaatccagcagcgtgagaaattaccatctagcccgataaaacggtaaacaaatttccagaatggtttgcaatttagaagagccggtgctattatatatttaaaccattttactattaatatatttaggatttaaattagctgtagcttcgaaagagggtaacaaagttaaatcctcttccaaagttgcagttttttaatgtaaacgtattacaatggtaaatggtgaattttaaattatgtacgatgaggtacattaggaggcaattttttatgcaaaacggtaaagtaaaatggttcaacgctgaaaaaggtttcggtttcatcgaagttgaaggtggagacgacgtattcgtacacttctctgcaatcaacggcgaaggtttcaaaacacttgacgaaggccaagaagttaacttcgaaatcgtagaaggtaaccgcggaccacaagcagctaacgtaacaaaagcataaatcgctttacaagcccccgacgaacctttcgtcaggggcttgtttatttactataaataacgagtgttgaaccgttccaggtgtttatcacttcggataacggtagacattgataaggatgaaacatcgtttgtccatttttatttagcacttgctcttcgctaatagcataacaaccatgaacaacttgatcattctgaaaccacacaagaacgtcatgaggttctacacgatttcttatcctagcctgatagccataactgttgagtgaagaaagaaactccctccctttcacccacgttttggtatatgtttgagcggcttccttatcaagattcattaatgtaaacgaaaagcaattaggtccgttacaaccgataaacgtgttaatcaatgggctactcgtctcctccccaacttgtaaagaacaagatgaaatgaaattccttgaaatcatttctaacaacttaaacctgaatgataatggtaacaacctccagctccacccttgaaatacaacgattttttcttgtttatacgttaaacaacaatcagccaaagtagttactgtggctggagcggaatcgattgtcaggagatcttgatacttaaaatagtaacctctcccgtattccacttgtgatagaagaagtttttcctgcttgtccttatcgagcgataaaaataactcgtttgaaactttagctatccactcggcttcaggatgaacattccaagttagaaatgaagttctctcatcaagacttaaattagcatatccttcttttcgagaaatggttttaaattccctgggatcatgtttaaagaataaaagatcataatccggcacaaatcgtttatcccacatttctaagaccctacccgataatcggttattttccacccacatcacttggacttcttcctctctgcttttgttcattcagtcatttcaactaggagaaagctgtttacaaagaaccagctcatcatgaatcggaatgccatgctctccaattaacgggatttcaggcttcacttgacgagcccgatcgactgccccttgaataacttcttttatacgatagccttttcgttgatagaagcttaaagcacgaatattatcatttgtcgtaataactctaatgagcgggaattgatgttctactgcaattaactccaccatcataattaatcgtgaacctatcccttgattttctaaaacactatcaagaaaaataatttcaataacacgatcatgacgcttaaatgttacagcgccaattatttctccggttgaactccatgctacaaatccctctaattcatgcaggttgtattttcctgtagagattaccatttctgtacttccccataagtcagtaaaaaaatctgctacttgtttttcatgcatacaagagagcggctgaattcgatatgtagcaatgtcattaaccattaagaaacagtcattccacttaccttcgtggtattcatgtttttggaagaacccctagctttgtaaacccaacatgctcatagcagcgaattgctctttcattccatttttgtgggtccattacaatcatagatccttttaaagtcgtttcaatataataaacgaccgattgaacaaggtttttcccaatgccttgattccaatacgacgtttcacctataaactgatccataccataagtgcttgcaggaagtgtgatcccatcaacctctatcattaaataaaattggatatagccaattggagtatttttaaacagtaccaggcatcttgtttcatcgtcatctaaaaagaaatcttctaaaactttctcgtacgtataaggacgatctttcccttcataataagttaatacctctggatctgttaaccactttaaaagatagttctcatctccgtctcttaaataacggatgctcacatctccctttttaataattggttgcatttaaatcctcctaactaatttattcttctattaccacttttcactttatcggaatagccttacataatatatatacgaaagctggaaaaattttttagaaaaaaatacacaataatagtaataatattatcctatttcgggtatactaataagtttaggatgtataaatgtcatcattagtatgttacactaagagaaacttactagagatgggatatgataaacatatatgggaaaatacatgattgaccaccaaaaacaaattgtccataggacagcttacgctggtgatgaatgtcatttacccgacactccgattaaagaccgaactgaagccaatcatgaacaagaattgcttgtttacttaaggcaaaaaggatacagtaaatgtgcctcatgcttttttggctcaacctttgaagaatcttatcaattcgagcatccacatagacatgcataaatatggatgatgataacataaatgagaatatcttattctagaggcaaggatgcaacatccttgcctcttttctttacttatcattcttaactaacagaataataacttgatgtgcttcgcttcgaatatagtcgatttgtttactattgataaccttccatctctaataatttctttaaatgttagcgatttcaggatataatgcaattggtcgcttttttctgaacactttttttattcaagagtttgtattttcatgttacataaaaggagttgatatgttatattcataactatgtttttataaaaatacgtttagattgatagaaaatccgttgcgaaacgacagaggtgacactacgtgaacagtactcatcaaagaaaagtaacttcagaaggtttattaaaattcataattccatctctcattggtattttcttattcatgattccaatccccaatgatgaaggtgttaccattccaatagcgaaattggcaggttggttacaaggcttatttggaacaactattcctttttctctacctgctcttatgacgataattattgcgataactgctttactaagtgcctatgcagttatcgcaaaacctgagtggattacaaatcgtccttttctcaccagtcttctccaagtatcatgggtctggttaatcgctcgtgttctgggcatgattttcgccattttaactctttatcagattggtcctgaatggatttggtcagatgccactggcggcttgttattaaatgatctcattcctattctcttttctgtatttttatttgcaggcctctttttaccactgctcttaaatttcggtctgttagaattttgcggtacgctccttacaaagataatgcgaccgattttcacacttcccggtcgctcctcgattgattgccttgcatcatggatgggcgatggaacgattggcgtattattaacaagcaaacagtatgaggaaggctattatacaaaacgtgaagcagcggttattggaacgaccttctcagttgtttcgattacgtttagtattgtagtacttcaacaaatgaagcttgagcaatatttcattccctactatttaacgatagtactagcaggcgttgtagccgcggttattatgcctagaataccgcctttatctcgtaagccagataccacttatgaaacagcagcagaagcaccggatgatacaattccaaaggggcattctcgttttcaatggggtgtccttcaagcaacaaagactgctgaagataatcgcacttcaaatgtcatcaaaggcggcgttcaaaatgtgctcgacatgtggatgggcgtaataccaatcgtaatggcaattggcacagttgctttaattattgctgaaaccacgccactatttagttatcttggtgctccatttgttccgattcttaatttaatgcaagtaccagaagcagctgaagcagctcaaactatggtaattggatttgcagatatgtttttaccagctattatcggtgcagatatcgaaagtgatttaacccgctttgtaattgccagtctttcagtttcccagctcatctatatgtctgaagttggtggtttattgctaggttctaaagtacctgttcgatttattgatttatttattatttttctagaacgtacgattatttcactaccaataattgttgtgatggcacatatcattttttaacgtgaaaaaccgggacaactttgttccggttttttatgttttattttgtcttttgattgttttatggtagttttaactacaggtattaagttaattttatatataatacggtatatgaaatttttataaagtatcataataaaacagcggccattaagccgctgtttcgttttactgattgaaattaattacaatttttccttgtgcatgatgagattcgcttagctcgtgtgcttcttgaatgccttcttgactgaacggaaaacgatggcctatcgtagctttaatatgaccattttccatcaaggaagcgatctctttcaactgctctccatttggctcaagccatacgttcccggatctcacgcctttttcttttgctttctcctgatcaggttcaccaacgattgaaacaaggcgacctccaccgcgcaaaactgaaaaactcttctcttgaatatctcctcccattgtatcaaggacgacatcaaactcttcaagttcttctgaaaaatcctgcttgcgataattaattactttgtcagcgccaagtgactttaaatattcttcatttttgccactagcggtagtagccacataggctcctttatacttagcaagctgaatggcaaagcttcctacaccacctgcaccagcatgtatcaataccttttcatccttttgaatatctgcaaaatcaattaaacattgccacgcggttaatcctacaagtggtacagatgccgcttcttcataagaaatactatcaggaatatgggcaagcaaatgatcatctactacaacttcctctgcatatgtaccatttgctgttgttgcaggtctcgcaaatactcggtcaccttctttgaatccttcaacagaagaacccacttctttaatcactccagcgatatcccacccaagaataataggaaagttaaaaggaagcatttcttttaaataaccttctcttaatttccaatcaatcgggttaatggaagttgcatagcttgttaccactacctgatttttatccggtgttggtgatgccatctctttttcaactagctcatctctactgccatattgttcgattacaactgctttcatagtagaaaactcctttcaaccagtgtctctctactatgttccctttctttcctcttttctaaacagtcgaactgtcgatacgatcaaatttagataaagtaatcaagttttggacagttagtattccctgccattcttttttagcaacttcccaatgattttcaaattgtccccatgcccaggttggtttccagcttccattctcgtgctgattttcaattaaataatctaaattcacattcaactcctgattgagttctttagcaaaaggcgattggacagagtccaccagaaaaagaggctgaaccccatattgatcccatttttctggtcgatcaacaatgtatgataatttctcctcaatcttctggtgaatttcttgctggacttctgcgcctgctagccttcctaagcgtagataacattgcacctcatgaatttcatattcatttaattgactaagatgatccaataccttttttaacgcctcttttgtgacatgatggtgcacgttatagtggaggagatatccaacgatctcagcatcaggattagcagaataggtaaattccttttccgatacatgccaccacggtgcatgcggaacatcattcacaagattaggcaccgcctgccaacctttcctatcctctcgaaaagttttaaggaaataattcgtaccttcaacaataaacggatggtgagcgtttactccaaggtggttaagatattgaaatgctaccgttgtggctaaaggagatgattcttgcagacaaaaatcaggctcaatatgattcccaaaaccaccatctttatttcggaaagcttcaagttcgtgaagtactctatctttatctccattccctctccagtatgcgaaatactcccggtcgagcggtcttgcatgtagcgctataaatttacatgctttttcatactgtccctctgataaggttttcatgtttatcattcctttcaatcttttcctcacttaagctatttctggactatatttttatctcctgctttcttgaaattatgacactaaataagtagagtaatagaaagaaagagattttgaaaaaggaggatatttatgaatatcattatctttggggcaggtgcacttggtacatatttcggagcaagatggatagaaagcggtgcgaacgtgtccttttttgtacgtgaaggacgaaaaaagcaaatagagcgtgaaggattacaggttacaagtgtaaaaggcgatacaaaaatctcatctcctacacttctgacaaacccgtctcaagcttcttcacctgatttagtattgttgggcgtaaaaggataccaccttgatgaaacgattccagtacttaaagagtttgttgcaaaaggagcaaaggtacttcccattctaaatggtattgaacatatttccattctaaaagaagaacttggggaagaagctgttttaggtggattatcgtatattattgcaactcttgatgaccatggccatgtccaccatacgagtgagctacatgaattaatttttggtccgcttcatccatctcaaaaagaaatttgcactttattaaatgaaataaataaacatgctcattttaactctcaattaacttctaaaattgaagaagagatgtggaaaaaatatatgtttatttccgcaatgtctggtgtaacaacagctggtgatatacatacaggaatcattcgagaagtgcccgagacactcaaacttgtagaagatgtgatgttggaagttaaaactcttgcttcttactatgaggtttacatcaatcaagaggatatcgatcatcgcatggaatcatttcattccctcccatacgaagcaacatcttcaatgcatcaagataagagaaagaaaaataaactagaagtcgaacatcttcaaggtggggctttacgccttgctgagcaggtacagttaaagcttccttatacggaaacgctctatcgtttaattaaaccttacgaaactcagagcagttagcatagaaaaaagcgaggatctctcctcgcttttttctatgcttttaccctggattctgataaaaataagtttttcgggttttcttcaaataaaatggttatcgtttcatccgaaacaccagctgccttcaatttagggattatctcttcgaaaagatacaccggctgccagtttgccatgattttttcgacttgttccggtagaacagggggacgtcccatccagtagttaacggtatcatgtgagagcataatttggttttcatatccgctattaagtaatccaattaacgtaatgagacgctctttatcgtaaggcgcgccaacgagtccctgaattccaaaacgatcgaaacctatattcactccccattctagtgtttttaaatgataagcggcatctgtatttccacacatatggccaataataattgcctgtggatttaccccttcttccacaagaagttttgcctgttcaggccccattgttccttcctgagtatgggtaagtattgaaatgcctgtttctttatgaactcgagcagccgctttaaaaaacatcttctcataatccgttatctgatctttactggacgctaacttgataatgcctggtttaattccagtcgttccaatgccatctgttatttcttttataaacatttcgtaaatatcttcttctgccgtaccaagactttgcctgaacttaaaataaggcgttgctccttctccttcatagtagtaacctgtcgcacaaataatttgaaggccagtctctgttgatattttctgaagaagctctggatttctcccacattcgtttggtgttggatcaacaacggttttcacaccgtgtgccatgacactttcagcaactgaaatcccaacttgaagcgcctcttggaaatcaaaagcaccaagtgaaatatcaccactaaatcccggataaccaaaagcaaaatgttcgtgaactagtgtttttcccaactgatcaatcgcgattggtcctgtaacggtttcgactgttttccccaccttacttcaccccctctgctttttgacgctcgttatcctggagctttctccataaaatcttaccactactcgttgtaggaaaagcgtccataaattcaatcattcttggatatttgtaagcagccatctgttctttagaccattcaataatctcttcttctgttacctttcctttatcattttcattcaaaatgacgaaagctttcactgtttcgccgcgccttggatccggtacaccaacgacacacgcttgttgaacagctggatgcttgtataaaatcgattctacttctgttggccaaactttaaagccagaggcattgaccatgcgtttcacacgatcaatcataaagaaatatccctcttcatcatatcgaccaatatctccagttcgaaaaaaagacttaccatcaagttcaatgaacgaactgcgattttcatcgtcacgattgtagtagccatcaaacacctgcgggccattcacaatgatttcaccaggctcaccaggaccgagctccttcattgtatttggatcgatgacacgtgcatctacatcgaacgacggtacaccaagacactggagcttaggaaaatctggtgggttgaaatgcgtatgagaaattgtttcagataagccatacccttcgataaaacgcaatccagttaaattgtataatttctctcctactgcagctggtaagggcgcgcctcctccagctagaattttcaatgatgaaatggagtagtttggtagatttggattcgaaagaaaatcgattaacattgtactaatattcacccaattagcaacttcatattgttcaatatatttggctgctaaattacgatcccaacgcgtcataataaccattggtgccccgctataaatcggtgcatgcatactatgaagcattccggttacgtgaaacaatggaagcgttacaaggtgcattccatccgcggtaatattcatccactgagaggcacctaccgcattcgcttgtagcgtgcgattcggatggatacatccttttggtaaacctgttgtaccagaagtatatggcataaccgcaacgtcgttggtcgttcgaacatactctccaggtacatgcgaatgatgaatcgcatctttccacctatagtggttcggtttatttactctttttgcctctaaagccacttccgcaggcatatcactttcattaccagcatagtgagaataggctgccgtaatcacattagtaagggttgtcgtgttcactaaaggttctactttctcatataactcctgacccacaatagctgttttaatctcgcaatctttaatataaaaagatagttcttctgctgttaacattgggttaattgggacgacgacggcgttagctcttaagattgcatagtaactaattacgaactgtgctgaattttgcataaaaagaaggacattttctccctcttctacacgcaactgctcaagaaatgctgcagtctgattgacttcatgaagtaactctttatatgtcatctttgctccataataaagaatcgcttctttatttgggtaccgtttagcagaaactgagagattatcataaatcgttgtttcaggaatggttagtgaatagggtactcgctttggccagaattgaaaatgatttgtttgcatcttgttagatcccctttcaacttctcttaatcttccactttcacaactttcccgtcttcaactgctccaatagcaggtttccagtcaaatgcaccgccattataaatccctgttaagtgccaaaccatcttttcatcaggtagtgactggatagctgcatccatgctttccataatcttcgttggatcttcgactgaacctgattcagacatggcattgacaatgacatgcatcgcttgatagttaaatgcaccttcagcagttggaattcgatcaaaacgttctttgtattggcttataaactcttctgcacctggtgcatcactatcaataattggtagagctccaattgtgccctctaactgatcaagtccacctagtaccggctcaatttcctcaatttttgcttggtccatcagcataaatccaccttcaaagcccaattctctagcttgtttaataacgagggctgttggctgtgatggtccacctacaaacagcacgtcaggattgttgcttaatgcttttgtgacaattgagaaaaagtcagtatctttactaaaatcaatggacccttcaaaaacgacttccccaccattctcttcccatactggttttagtgcttctgtccagtcttttccgtactgagatgaggttggtagcagtgcaattttcttaccaaaccgttccatttgatagtttgtaaaagcttcagggtatgcgctgtacgcaggtggaatccctaatgtaagtgaattatcctgttccataattgtgggctcacttgtataggctgcgattaaaaattcttcttgttcattaaatacttgtgttgcgaaaacaccaccgctgtgtggaacaaaaacaaccggcgtatcattttcttgaacaagccttctcgcgttcgttcctgtttcattaggcaaatactgatcatcaagcgttacgagattgaccccgtattttttgccatcaacttcaaagccttccttgttaatttcatctacagccatctctaaaccacttaacgtattctcaccatagtaagctgctggtccacttaaaggaccactaaatccaatattcacggtattttcgaatgtcgtatcagcacttgtatccttgctcgtatctttcggttcgcttgtatttgaagccccttcattgctagagttactaacagaacctgccgcacatcctgccactaccatcattccgatcaacatcaccatgtaaacaaaaagctttatcccgattctcattgttttccccctattcaaatcgattccgttttttatgccccaatataagcttttcgaatttgatcattagacaaaagttcctttttacttccttcaagaacaatcttgccactttcaatcacatagccacggttagaaatttgtagtgcagcattggcattctgctcagctagaagaatcgttgttcccttttcattaatatcctcaataatatgaaacatttgctccacaatgaggggggcaagtcctaatgacggttcatctagtaaaagaacttttggttttgccattaatgctcgtccaatcgctaacatctgctgttgaccaccacttagagaacctgctgcctcatgacgcttatcatataaaataggaaaaagggaatacacctcctttaagctctgttccacttcttttcgatgttttcgatgaacaaagctgcccattttcaaattttcgtaaacggacatttgtggaaacaactttctaccttcaggacattgcacgatcccttcttttactagagagtggggtgattttccagttaacttacgatccataaaaaccacatcaccagaaactggcttcatcaaaccactgatcgtacggaaaattgtactttttccagctccatttgcaccaagtaagaccactgtttcacctttttttacttcgagtgaaatattatgaagtacggaagaagcgccataattcacattaatattgtttaactggagcatgcgcttcacctccgagataggcttgaataacagcttcattttgacgaatttcatcaggtcgtccttctgcaatttttttcccgtgatttaagacaacgatttgatcagcaaggctcatgatcattggcatcttatgttcgattaaacagacagtaatgccatgatccgccattttcctcattaaatatgcgagcccatccgtctcgtcaggattaactcccgccgccggttcatcaagaagaaccagttctggatcggttgctaatgcaagagcaaaggcaagtctcttcttctcttcttgcgtaataagtgagacaggatgctcaacaacatgcatcatttcaacaaattccagtgcatcgagtgctttttgataagaccttttttcttcctctttttctctttttgttcgaaaaatcgcatcccaaatccctgattttgtgcgcaatctatgtccgattagaacattatctagaacggtggattgctcaaacaagttagtcgtttgaaacgttcttccaattccaagacgcgcaatttgctgtggaggcattttcgtaatatcactatctttgaatagaattttccctgaagaaagtggatggatcccactaattagattaaaaaaagtagattttccggcaccatttggaccgataattgccgtaatcgtacctttttcaaccgatacactcacatcttcaacagctgctaatcctccaaaacgttttgtaatcccctctgtggaaaagaacattaccctacctcacctactttccttttctcatcatgttcttcattcgctacctttactctttgctgtttctttctctgcaaatagccatttatacttccagtaattccacgcggatagtatagaactaatagaacaacaaccgggccaaaaataagcatgcgatattcttcaagaaactgtaatgattgagtaagtgaaatgacaataagcgttcccacaataggacctgcaagcgttccaatgccaccaactagaagatacatcagcatttcaaacgttacggtaattgctgatatttgaggaccgataaaacgaataaatgaagcatataaggcacctgaaagaccggcaaataaggctgataatgtaaaagccaacagctggtttttcataatggagattccaattgtttttgcaagttcttcactgtttcttattgcaataaacgttcttcctagaagagaatgaacaatgcggtaacaaaggaaaattgtaaatgttagaaagaacaaagcaaggtaatattgagaggttaatgtatcaaacgtaattggccctatgttgcctggtgctggtatcccgattaatccccgaacaccaccggttaagctatcccacttgtctattaaaagatagacaatgacacctacacacatggtgtaaatagcaaagaaatgagatttcgttcgaagagcaatcactccaactagagcccctgcaatggaagtgataagaactgccagaaggagagatagccaataagacaagccacctttggttgttaatagaccaagtccatatgctccaattgcaaaaaaaccagcatgtgcgagagacaaataccctacataccctgaaataatattaaatccgtaaaccgcgatggaccaaataaagacaagcgtaagcaattgaagaacatacatatttggaaaaactaggggaaataaaacagcagcgacggcaacgatactgattagcactcgcttcgataagacattcagcattactgaacccccttcgtaaataacccagttggcttagctgttagaatgactacgagtaggagaaacgcaatcacgtctttgtaatcagatgatatgtacgttgccccaatgctttcggttaggccaagcaagtaaccaccaagaatcgctccggggatacttcccattccacctatgataatgataacgaaagctttcataataaccaggtttcccatagtcggaaagacaagattaattggggatgctaacgatgcagctgcagctgctaatccaccggcgatcgcaaaggtaagccaagctacctggtttgcattaatacctacaaggaatgcgccctctcggttttgagccatcgctacaatcgctgctcctatcattgttttcgttaagaaaaaatgtagtgcaagcataaggattacagcagcaacaataattaaaaggcgttgtaacgttacagttagaccgaataaattaatgactgacccataaggagtgtccattctgtggtattccgttccccacataaattgaccaaatgcttctagaaaaaggagaatcccgatggcagcaaccatcattctcatcccatctgcgccttctaactttttaaatattagctgctgtgtgacaaccccaagaaaagcaacaacagccactgacgcaataatggcgatccaataatgaaaaccaaaaccaaccatcatcattaaagtaatataagcaccaaccatataaaaagcaccgtgtgcaaaattgggaacatgtaaaatgccaaaaacaagtgttaaaccaagagcgacaagcgtgtaaacgcttccaattgtaagtccgttaaaaatctgctggataaggagctccatcatcttcctccttctattaaattagatccagactagggggacggcggacttatgaaggagattcaagatgtaggaatgaatctggattgaaaaacttcaatccagattcagaaatttatttacctttaaattgtggcgcgcgtttttctttaaatgcagttgctccttctttgtggtcttctgtcgttaccattagtgcctgtgtaatgcgttcttgttcaagtacttcagacaaagaagaggttagcgaagcatctgcaatcttcttaatgaaaccataagctttacccggacctttagaaagcttctcagcatatgccatcgcttcttcttcaagactagcaatcggataagttctgtttacaatatttaactctttcgcttcttttgctgaaattggttgggctgagaagaacagttctttcgctttataaggaccgattaaacgaggaagaaacgaaagacccccaccatctgaaattaatccaacctgtgaaaaacttaacacgaagctactatcttcagctgcaagaataatgtcactagcaagtgctagattaaagcctgcaccagcagcaaaaccatgaattactgaaataattggtttctcaagatctctcatagcaaggacgagctcatttaacttacctatgtgttcataaacttcagttgaagttgtagcccccattgttttaacatccccacctgcactaaaggaacgacctgcacctgagagcataactactcgtatctcatcgttctccttagcatcttgcatagccttcgtcagccctaagatcatttcgggactaaacgcatttagtgcctcaggacgattaagtgtaagatgaagcacagcaccatgtacatttacttttagatgttccgtttttacagtcgtttccatttttaaacactctccttttttttatacgatgagccagccgccgtcgactaataaatctgaaccagtcatataactcgcttcagatgatgccgcaaatgaaatcacgtttgcaatttcctcagcctgacccactcgttttaatgctgtatttcgtttaatggacgcttcgaacttttcattttttaaaccttcttcagttaatggtgtttcaacaaaccctggcgagactgaattcactcgaacgtaaggtgatagttcaactgcaagtgctctcgtaaaattgatgaccgctgctttcgctgcactataatgaggaatttgcgctcctgctttatgaccagagagggaagcaacattaacgatagaaaagtccacttgatcttctttctttgcactttctaacatcagtttacctagagctttcgagacgagaaaaacactttttaagtttgcattttgcgcatgatcccagttttcttcagtcatctcaagaatcggtgatccttgagatcctccagcattattaattaagacatgaacggttcctgtcttttctttaataaaggaggacaattgatcgacctgatcttgactcgttacgtctgcaacaaaagtaagaacattaccttctaattctttaagctcatctttcgtttgtattaactttgcttcagtccgaccaacaagaataactgttccaccttccgatgctattcgtttagctgtcatagcaccgataccacttcccccaccggttattactgctgtttttcctgaaaatctccccatttttctcaccgctttctaaacttcgtactttaattttccatagctatgcattgcgatcattcgatttcgttcaagtgaatttccaaaatcataacttgaaagttctcgaataataagattcataacctcgcttttgtcacgagtaggaagcaaactcattattaatttacgagctgacgcttccacttgtaagagcgcttcctcaaggaatgttctcgttaatgcttttttaatatggaaatcttgctgttcatgttttacggcacgtaatactgaagattcagctgcgtatagcatgatggctatattagcaagtttaattactgattcttggtgattcattagttcctcaccgtgcttttcaaatgcaactccgacacacaataaaaacacgtttcgtatgcttcttatcgcatcttcttccgttaacgaatctttttcctttgaagataactctctttttgctttttcaacaagctcctctaaaggtacctcgcctttcagcgcttttttaagtaaattacctggaatcaataagcgattcacttcatttgttccttcaaatatccgattaatacgcgaatcacggtacatttgttcaattggatattcttgaataaaacctgcaccaccatgcaactgaagtgactcatcaacaacttgatccagtgtttcagaaccgaaaactttacaaatcgcacattcgactgcatattccatcatttgcttccccacaattcgatggtcctcttcatcgtataaatctttcatcgcctcttctagaagagatgctgtgcgatattggagcgattctgaagcgtagattcgagccatcattacagctaccttttcttgagtagccgtaaaacttgcaatggtttggccgaattgtttgcgttcatttgtgtgttgtaacgctaattttagcgcgtgttttgctcctccagtacaagctgagcccaggttgaatcgtccgagattcagaacattaagtgcaataacgtgtccttttcctacctcacctagaagatgatcaattggaacctgacaatcttctaaaatgaccgatcgtgtggaagatcctttgattcccatctttttctcttccggtcctagagataaccctggaaagtttttttctacaataaacgcagaaaaatgctttccatcaattttggcataaatgatgaacgtatcagaaaataccgcattagtaatatacaacttagttccgtttaaaatataatgagtgccttcgctatttaatacagccgttgtttgagatgctagcgcatcagaccctgcattcggctcagttaaacaataagcgcccagatattcacctgaagcaagtttaggtaggtatttttccttttgttcatttgttccaaagtgcgtgattggaagcgttgcgatacacgtatgattggattgggcaacgccgtatccactcgttctcccaacaacttctcctacaatcccctttgatatcttatctagcccaagaccaccgtacttttctggaatactgtgtccaagcagaccaagttctcctgctttttttaataaagtgacaacctgatcaaaatcttgattttcaattgtttctctatgagcttcaacttcctttgtaacaaattgatgagctgtttttgcgatcatcctatgctcatccgtaaaatcttctggtgtaaaaatatcttcagaaccagaatgctgatacaagaagtctgctcccgatcgactagatctggtttgtgtcatgatgaacctcctctcgaacgactgttttttgacctttaacgaaaggcacaatagaaaaaattccttctgaagcaacgaaacttacttcatcctgaaaaccatactttttaatcatttgaccgacacgtgatgaaagcaaaacttcctctccaccattgacgctacctgaataaaaagaatgagctgcgtgtgacgaatctgttaactcccagttaggttcagaagaaagcatttgatcaatgagatatccagctccatagaaatcctccaacgcgaactccccagaagaacctgaacaaacaatcacgatcgtttcgttgaggtgatgatcattgagcttttttgcaactgcttgaccattcagtaaagaagcaacatacacttgtttggcttcactcgttcgcttaatcgctacggttccattcgttgttgatagaatgagggtttttcctttgaccgattttttcaattgcaatggatttgggtcaaggaatccttctatcgtccgaccttcatattctcctgaaagcaaataacttccttcaggtaaggctttcgctacatgcgtagcctcatgttgatcgaggacagggataacctgttctgcaccaaattcaagtgcagccgtaatagttgaggttgctaacaaaatatcaagaacaactgcaattttatcttcacttatttttgcctgatcaatatcttcctttttcaaaactacatgtattttccccatatgagctcctaacgctttactctggcattgtcacgcgcatgtgcaactaagctagcgacaaactgattaagatgtcggaaacgctcgtcagttgtttggcccattttccatcgataatagatttgctgacaaatgacagctagtttaaaataggcaaacgttaaatagaaattcatttgggatacgtcacgccctgatttctttgcgtaagactggataaattcatccctcgtaataaaacctggcatgactgtaacaggtgctttccccatgccagcttttaaaatatctgggtcatcttgttgtaaccagtagcccatcgctgcccctaagtctgcaagcgggtctcctaccgtcgtcatttcccaatcgaataatccaacgatttcactgtaatcatcatgagcgaacatcgcattgtttattttgtaatcataatgaataacggtaggactttgggatttaggtatatttgacgccatccagtttgtaagttcatcaatacctggaagatcgtctgtttttgatcgattatatcgtttaatccagccgtgtacttgccgttccataaacccatctggatgagtaacacccgctaagttcgtctttttgtaatcaatgctgtgcaggttcactaacgtatctaccatcgtttcggaaatgcttcgacacagatcctcagtcggttgaacgccttcaggaaatgatgtatcaagaacaatgcctcttcttctctccataagaaagaatggagcatcaagcaaagtcccattgtagagatacggttttggggctagtgggaaaataggatttaattcttttaatattgtaaactcgcgctgcatgtcatgagctttcggtgccactggtccaagtggtggtctacgtagcaccgcttcccaatcgccaattgacagctgataagttaaattggagtgcccagtgccgaattgttcaacgagtaaaggatcatcactcaaatcatcaatgttttccttgataaattgctcaagcttctgtttatcgagctcctctccgtctcggacagggatcgtatcgtgtgaataagccatatgccacactcctgattacataatattcagtcatctactcttaaaaaaagcacaagttagaggagttgataagattcctcaagttttaatcgtaagtcttctgggatcacttcactcgcttgtttcttgaaatcaaaataaacgactgttgcttctccctctgctacaacggcatcacttgccgtatcttttatatgatgcataagggtaaaacttttcgttccaatacgtttcacagttgtttcaacatgtagagactgtttaaaatatgcctgtttcagaaaatcgcattttgtagaaacgagaataaacggccaatcgtctgttccagatcgtttaccaagataatcaaaaaactgaactcgcgcttcttctaagtaaataaaataacttgtattattaacatggccgagcgcatccgtctcacaaaatcgtactcttacacttgtatgcacactcattaaacttcctcttttctattacctgtgagtaaaggcaggctttcttttttccataaatgcttgtacgccttctttaatatcttctgtctgaaaaacttcttcaaacaattctgcttcaagttcaacggcagattcaattggaaggtgcgcaccattgttcactgcttttttgattcgtgataaagcctgcagcgattgaccagttatttttgaagccagtccttgagcataagtcatgccttgtccggatggtaccacgtgatttacaagaccgtaccgatctgcctcttcagctgaaatcggttcacccgtgaacatcatttcttttgctttggcttctccaataagtctaggaagacgctgcgttcctcctccacctgggaaaagtcctaactttatttcaggaagtccaagctgagcgtgttcctcagcaattcgcatatcacacgtcattgcaagttcacaacccccaccaaatgttaatccattaagcacagcaattgttggttttgggaaatgatctaaataattcaatacttggtgagtttccattacgatattcttaaaaccagactgtccaatccaatctggaaactctttaatatcagcaccagccataaaggctttgtttccagcacctgttaaaataactgctacagcatcttgattcgcttccaactctgtaaaaacctcaaaaagttcagtggatacttgtttactcataacatttaaagggggattattgatcgtaacgatagccgtcttttcatgaatttcatacgtcaccattttcattaatttttcactccttcttttgtatagtcataccagccttttcctgtttttcttccaagtgttccagcttttactttatcctcaatggctttcgatggcttgtcttctggatttcctgtttcgttataacgttgctgcatcacgtaataaccaacatctattccagataaatccattaattcgaatggcccaatcggatgatttagagctttgcgacaaatcaagtcgatatcttgaaaatctgcaattccttcttcgtacaaatacatcgcttctttttgcaatgcacctagaatccgattcgcgacgaatcctgaaatttcttttttcattaatacgcctgtccgattaatgcgctcgcaaaccgccatcgtaagctgggctgtttcttcagaagttgcttcactcatgaccacctccacacagtccataactagtggtgggaagaagaagtgcatgttcacaactttttctttacgattcgttgcggatgcgattaatgagttcacaattgtagaactattagtcgctagaattgtatttggatcggctaactgatcgagcttttcgaacacttcacgctttacatctaatttttcaacaatggcttcaataatgaagtcagctcttaccgctgcttcttcaagatttgttgaaaattgaagtctttcaaacgctgctgttttttgatcttcggtgattttcccttttttaacccactttgtcataattccttcaagcttctcacccgcatcttttagagcagcttcattaatatcctgaatcattgtttcatacccaccaagtgcacaaagcataccaatctgatgccccatagagccggctccgagcactgttacctttttaatttcttctattttcattctatttcctccttaagtaactaaccggttaggatgtaaaattcgcaagcgctttcatttggctgggaaaaggaaagcttatctgctttcctcaatcccatttaataccatgtcaacaaatatacttgctacttctttatccgacaccggtccgtttggcttataccactgatacgtccaatttgtaatacctagaatagcaaacgttacgatatcgatattgagatcttttctaaactctccatttttaacaccttgttttagtaaatcctgaaagtaatagcggatttgatcacgctttggaaggatttcagcgagattttcttcttttaaatttttcatttctcgaaagaaaactcgcgcactgtgtccttctaattcaacgttatggattagcatataaaccatatcgtagagtttttctttacaacttttagacacatcttctaaaatatctttctgttgtttaatcatgccatcgatataggaagaatggatgtccattaacaatgcttctttactcttaaaataataatagaacgtcccttttgttacaccgattgcatccacaatatcttgaatcgacgtttcactaaatccatttttttcaaacagctcaatacttttaacagttagtttgtgtttcatgctagtaccctctcaatctatcaatctacattgattaagattatatcatatggaggttacttcaaagcatccaacctatagctgacgtgcttcatcacggatggagcgtcttaaaattttccctacgctcgttttaggaagctcattacgaaattctacaatttttggaactttataaggtgccatttcatcctggcagtaagaaataacctcctcctccgtcaaagttgctcctggtttcttcacaatcactgcctttacagtctcaccgcgataaggatctgggacacctacaattactgcctccataatacttggatgttcataaagaacctcttcaatatcgcgtgggtatatattatacccgctggcaataattagatctttttttcgatcaatgattgaaacatacccatccgcatccatttttgcaatatctcctgtaaacaaccatccgtcacgaagcgtgttcgccgtttcttctggcaagttccaataccccttcatcacctgtggtcctttaataataagctcacctgattctccaaacggtacctctattttcccttcagctaaatcaacaattttgtactctgtagaaggaaagccaatgccgacactcccaggcttacgctcaccaaaaggtggattaacatgcgtcgtcggagaagcttcacttaagccgtatccttcaagaattttagctccagtttttcgttcaaactctttcattaatccaactggcatcggtgcgcttccactattacacgttcggatgcttccaagattatatttttccgcctctggatgattcgttaaagcgacatacattgttggaacaccaggaaacatggttggtttctctgtttcaattgtttttaaaacttcattaacatcgaatttcggcaaaattacgctctccgctccaattcgaatcgataaattcatacacgatgtcattccaaaaacgtggaacaaaggaatgactgttaaacatttttcttcaccaaacgtgaattcacctttaaaaaattcgagacattgctcaacatttgcaatcaaattacgatgagttaacatagccccttttgatcttccagtcgttccaccagtatactgaagaacggcaatgtcttctttaggatcaaccgaaatctctttcagttgctcctgcgtactttgaataaactggtcgaaagtaaaatcaggggcgaagttcgtttccgtaggcttaagagagaccacaatcacgttcttaacattcgtttcgctctgaatagctttcaatcttggataaagagcatcatagataacgatcgtttccgctccagaatcagctaatatgtactgaagttcacgttctacaagcataggattgatctgagtaatcgtcccccctgcttttaacacgccgtaatagctaatcgcaaactgaggacaatttggtaacataaaagcaacgcgatcctttggatgcacttcataagtatgctgaagagctgagccaaataatgttgaaagttgcccaagttcacggtaagttatttttttttgataaaaagagagtgcgacttgatctggatattcttttactgttttcgttaacatgtcctgtagagaaacatttgggatatcaattgtactagaaatggagtcagggtaatgctttgtccaacttttttcgttcatgcttgcacctccgagtaattaaaacgttaatccgcctccgtcaacaagaagacttgttcctgtaacgtaagaagcttcatccgagactaggaatagcacggcgtttgcaatttcctctggttgtcctacccttttaagcgcattggcttttgaaataatgggccatttacgttcatcttctctccatggtgtcacaatgtttgtatcaattactccaggacaaacggcattcactcgaatgttcttgcttccgtattcgagagcagcattttttgttaatgtaataaccccacctttggatgcattataaggggccatatatttttttcctttaaaccccaatagacttgaagtgttaacgattgagccaccatttctcttttccattaatggaatactaaatttcattccaagaaaaacgcccttcaaatttatcgacacaacacggtcccattcctcaacagaaacatccgctaatttcacttcttcgttactaacacctgcattattaaaaagaatgtcgaggccaccatagtgctgttcacactcttctacaagcgctttcatttctccttcatttgccgtgtccgtttttacaaatatggcatctccacccattttccgaacttgttcgacagtttcttctccagattccgcgtgaatatcagagacgattacctttgccccttcatcagcaaagcgaatcgcggttgctcgaccgattcctccaccgcctccagttacaattgcaattttatcctgcagcctcatttcatccctccttattcccgctctaaaacagttgctattccttgacctccaccaatacaggcagtgatcagcgcatatcttccttctcgacgatcaagctcataaatcgcttttgttgctaaaatagctccagttgcacctaatggatgaccatgtgcaatcgcgccgccgttaacattcacaacattttcattcattttcaattcacgatcacaagcaattacctgagcagcaaaagcttcattaatctcaatcaaatccatttcctcaagtgataatccgctttgtttcatcaatttttgcgtagctggaacggggccgattcccattatattcggatcgactccgctaaccgcatatcctctcactaccgcaagtggttttaaaccaaggctttcagctttttcgcgggacataacaataagagcggatgccgcgtcattcaaaccagagcttgaccctgctgtgacgcttcctcctttcttaaatacgggaggtaatgaagcaagacgttcaatcgttgtttcaggtcttggatgttcatcctttgttactttaatcggatcgccttttcggacaggtacatgaacgggagcaatttgggagtcaaaataaccttcagccatggctttccccattcgttcttgacttctttgtgcaaaggcatcttgttcttctctagtaatgtgatatttttccgctaaattttccgccgtaacccccattggaggatcgccaatttcgtcaggagaaaggcgtgacttcataaaacggggtggcattgtactaaatggcttagatggtttttccattaagtatggagcctgactcatgctttctgctccaccaacgatatagacatctccatctcctgatctaatcgcttgtgcagcaagatttatcgcattcaatcccgatccacactgacggtcaatcgttagtcctggaattgaaagagggagaccggcctgcaatgctgttagcctcgcaatattccctcctccaccaataacgtttccgaagatcacgtcatcgattgattcaacatctaaattgatacgtgctactgcttctttaagcgcgattgcgccaagctcatgtgcttgtattcctgcaaacgcacctccctgtcttccgatcggtgttcggacgctagagacaataactggatcacgattcatatgattttcccccttcattacattgcatgttgtccaccatctacaattaagatatctcctgttacgtaattcgaagcattcgatgcaagaaaaagcgccgcccctttcagatcatcgtctgttccaaatcgattcaatggggtcgtttctagcatcctttcaccaccagcgtcaattaaacctttggacatttttgtagggaaaaagcctggtgcaatcgcattaacattgatattatagctcccccactttacagcaaggtctttcgtaaatgtaatcactgcacctttactcgtgttataaccgattgcatccatgtagcgcgggtcagcaccaccaagtcctgcaacagaagcaatgttaatgatctttccacttttttgtttaatcatttctttcccaactgcctgggcaaataagaacgtaccagtgacgttaacctccattactttgtgccaggcttgaagcggcatttccactacaggtgccccccatgaagcgccgctgttgttgacgagaatatcgatacgaccaaattctttcattgttgcatcaacaacatcctgaacctgttcttggtttgttacatcacattcaaacgctaatgatttcactccagtttcttttagctcctcgctaacagcttcacaagcttctcgcttccttgaacaaatcacgacgtttgcacctgcctctgcaaatccttcagcgatttgctttccaagccctcttcctcctcctgttacaattgctgtctttcctgttaagtcaaataattgcatcacgttcatatcttatcccccctaattaacgatatttcttcaattcctgtctcgctactgcactgcgatgtacttcgtcaggaccgtcagctagtcgaagcgttctagcgttagcccagtgagccgctaacgtataatcatcacttacaccggcacctccaaatgcttgtatggctcggtcaatcacgcggagagccatattcggtgccactactttaatcatggcaatttctgctttcgcttctttatttccaaccgtatccatcatataagctgcttttagtgtaagcagtctcgcctgttcaatttcgatacgagaatcggcaatccactcgcgaacgacgccttgctcagagattttctttccaaaagcttcacgactttgtacacgcttacataagtcttcaagcgctcgttctgccgttcctattaacctcatgcagtggtgaatacgtccaggaccaagtctcccttgagcaatcgcaaaaccttttccttcttcccaaagcatatttgaagctggcaccctgacatctttgtactctatttctgcatgtccgtgtggggcatgatcataaccaaaaacgggtagcactcgctttatcgtgacgccttttgtatcaagtggaacgagaatcatggactgctgttcatgtttagatgcatttggatcatttttacccataacaatggcgattttacatcttggatctccggcaccagaagaccaccatttcgttccattgattacgtattcatcgccttctcgttcgatacgagcttgaatatttgtagcatcagaagaagcaacatctggttctgtcattgagaagcaggagcggatttctcctgaaaggaggggttctagccactgtttcttttgttcgtctgtaccgtaacgtactaatacttccatatttccagtatcaggggcggcacagttaaatacttcaggtccaatcatggaccgtcccatcacttcacaaagaggagcatactcagcattagttaatccagcgccatattcactttctggaagaaaaagattccataatcctgcatctttcgctttctgtttcaattcttccataattggtggaatccttgaccatctactgtcctgttctgaaagctgttcttcatacactttttcatttgggtaaacatgttcatccataaatgcagttaatttttcaagatacgctcggcaacgctcggaatagtcaaaattcatctattgttcgctccttttaaccgatatctaactaaccggttggtatgttcttacaaacagtataaatttattattctcaatattcaatacattttaataaaaattaaaatccagttggccaatttgctagctttctttcacttattgagccttttttataacatgccaactctaggattttagcaagaaactgcctcgtttcccccggctcaatcacatcatcaattaaatgttttgctgctgctttataaggtgaactatcaaaactccatttttctaagagcttctctcgatcctcttttggattttcagatcgcctcaattctcttccatagacgacattgatcccaacttccgggcccgtaaaattgatttcggcagatggccaggcaacgacaaagtcagctcccatcgttggaccacacatatttccgtaagccgcacctacgcttttccttatcaccactgataccttaggaactgtcgattgtgcaagtgcttgattccacatcattatcttagtaggaattttccctttctctgcttcagagcttactcgaaagcccgggatatcgtgaagaaagattaagggaatatgaaacgaatcgcacagacaaataaaatctgtggccttttcgcattcttgaacacctgcagcgccagcatatttcatcggttgatttgcaataatccccacagacctcccttcgattcttgttaacacggttaataatgcaggtccaaattctggctttatctcaaaaaagttcccattgtcaactaacgcagcgatcacttttctcatgttgtaagcgcgatttcgtttttcaggaacaaccgatagcaactgatcaaccctcctatctactaaatcatcgttgagagaaagtggtggttcttcttcgctatgggatggcagaaaacttaaaaacatctttaattgagcaatacattcttcctcggtctcagcggattgatcgatctgtccagtatagtgatgatgtacctcaacgccgcctagttgttcttctgctattttttctcctgtagcaatctcaagcattctaggtccagctacccccatacacgttccacttagctgcgtaacaaaatcagaagataccgcaagccacgtcggtcctccaaagctatcaccaagaatggccgttaccatcggaacttcgcgattgtgcgtcaacatttcttgagggaaaagcttatcactaatgccatcagaccccattccatctggcatgcgaagccctcctccctcacttagattaactaaaggcaggcctctttttaatgcataagcatgtgcggctttcgtttttcgaatatgaacggcaccttctgtaccggcaaacaccgttttatcgcctgcctgtacaacgactggacgaccatctacacgacctatcccacaaataaccccatcacctgaacttttttcttcatgtccaggaatttcagaggtgttcaatttcccaatctcaagaaaggatccctcatcaacgagaagcgcaattcgttcacgcgctgtcttttttcctaatgcatgaagcgcatcgattttgtgttgaccgcccattcgttccgcacgtagtcttcgattcttcaaatcttctacatatgattccatcattccactccttttcacttctttaataaccttcttaatactttacctgaagatgtagcgggtagactttcacgaatttctattattttgggtgctttataagcagccatatgatttttagcccattcggttagttcctcaatagatgcgttaaaatgattaggatataaaacgacgactgccttgatgatttctcctttttgttgatcaggtataccgataaccgctgtttgcttaatagctggatgttcattcattaacgcttcaacatcctccggaaaaacactataacctgagcttttaatcatctctttcaaacgacctcggaaatataagtagccttcttcatcaatatagccgatgtcacctgtatatacccacccattctttagagaagcagctgtctcatcaggtcgattgtaatatcccttaaaaacccctggactcttaattacgatttctccctctttaagtcgcccaacttcttcgctattcgtatttacgatttttagatttgtcttatgaataggaatgccacagcttccaaacttcacattttcagttggcataaacgtgtcacatgtatgcgtctcgcttaaaccataggaagcttcatatagtagacagccattcgttgctttcttccattgatctgcgagatttctagttacttgcacgccaaagcttgtcgctaaattaagacgaagcgatgttaaatctcgttcgttaagatcaggcatttgcaagattgctccgttcataggggcaatactataccacattgaaattcgatgatcctcaattgctgatacaaccgtttctgcatcaaaccgactcagaagcacagtttcattaccgctatagacaggtaagttaactcccattaccattccagcaatatggcataatggggcgatcgctaacaatttgtcgtcctgtttaatttgattgcaggtcatggtagaagctgttttaaataaagcgttttcataggtgagcatagctgctttaggtctcccagtcgtgccagatgtaaacaccatcaaacaaacgtcgtttaattgaacacgggcagattgaaatgaattttcttctgtatcaaaaagcgattctagagtagtaaaccttgaaggttttacggggcattttatttcagatggcgcactttcaatctgttctggtaagagcagtgactgataagtaaccgtgacaataaaggaaagagcgtcctcaatggcttcaagcatcggtaaaagttctaaaccgcagattattcctttaatgtctgcttctttaattaaataagaaagttcagaggctttatacataggatttaacggaacgacaactgcaccaagcttttgaattgcatagtgagaaataagatattgcggacaattttgcataaacaaagctatatgatcaccttgtttgacaccaatccgctccaaatagtttgctagttgattcgagtgttgattccatttttcccatgttaattgataaccatagtaatgaatggcaatttcatttggttttcgctccgcttgaatggaaagatattcatgaaggggtctttctccatattgataaattaatgtagaaggaactgcttctggccaaaatgatgtatgcttttccactttaccaccctttcatactaaccgtttagtatgttcttcttttatcatacaatttctgattatcttatttcaacagaaatttcatgttttaccttataaaaattgggaatatattttttattcatattagaaaggaagatcaccatgaatcaaaacttataccaactgacacgtgaatatgaaaaatttacggatgaatgtgaaggacaaagtgtgcccgaatttgtagagaatttcatatatggatcgatggattataacgaagaaaatctgcctaaactgacagaagaaatgggaaaacaggctcaaggacaggatccagataatttcaaaaaagcttttgatgaaatgcttctttatcttagagatcgctttgttgccctcgaccctgacaaggagtattggccattacattaccgtgaaggtgttagtgctttcgttgcgatgatcgatgggttaattgtacagtatttctctggactctattcagtagaagatttaaaagaacgaacccctctatttgcagcaataattcttaatggatttgtgggtattaatgaaaatgaatatgatacgttatccactgactaaaaataaaaaatcctgcccatgggcaggatttttgaattaactattttgaagacgatatacgcttgaatacttttcttcaagatattgaatcaagtattcagcattcaatccttctcccgtgatatcttttataatttcaattggttgctttagtttaccatactgatgaatgttttctgtaagccactctttaataggcagtaacttcccttgttctaaaagttcatcgaactgaggaagatctttcatcatagcgttctttaattgggctgcataaatatatccaagtgcataggaagggaagtaaccaaatgaacctcctgaccaatgtacatcttgaagcacaccaactgcatcgttgtctggcgtaattcctaaatactcctccatcttctcattccagatggctgataggtctttcacttcaatgtcgccatttattaaacctttttcaatttcatagcgaaccataatatgaagtgcatatgtcatttcatctgcttcaatgcgaatgagagaagggcctgcaacgttaatggcacggtagtagtcttctagcgaaacattatcaaactggcctgttgaatagctcttaagcttttcataattattttcccaaaatgactgatgccgcccaacaaagttttcccagaaaagagactgggattcatgaatgcccattgacgtcccggtgcataaaggcgtgccaattaattttggtgataaattttgttcgtaaagagcatgtccgccttcgtgaattgtaccgaacactgctgtgcggaagtccatttcgtcatactttgttgtaacacgaacatcacctgggttcaaccctgttgcgaatgggtgcaccgtcttatccagacgacccgcttcgaaatcatatcccattttcttcaatatatccatactaaatgcctgctgcttatcttctggaaaacgttcaaataaaaagtccgttttaggctgatcacttgcttgaacaacttgttgcacaagggggacaatatgctctctaagttgtttgaagacgcgatcaatcaccttaacagtgaccccaggttcatacatatcaaggagcgtatcatatttattttcttcatagccccaatattcgacaaacttttgattgaatgccactaatttttcaaggtaaggtctgaacaactcaaagtcagctttttctttcgcttcctcccagattgtttctgcttttgaacttaaaatcacatactctgaatattcttctgctggaattttaatgttacgctcataatctttgcgacactcttcgaccgttttacgtgtgatttcacttaaatctgcttgcacgtcttcttttgtaagttgatcaagaaatcccttcatttctgaagaaaccgacatttcaaaaacttcagaagacatcatgccaataacttcagaacgctgctcagcaccttttttgggtgcgccagttcgaaggtcccaatacattacaccaattgcttcattaaaactcatcatttttttaacaaatgttaaaaattgctcttctacttgctttaactctttcgtcatattttaaccccttttcaaaatgatattgttcttcgcattaaattcgacacatctcgcttcattatgtaaggatttgtcggaagttaaaaaattcaaaaataatcgatctgaatattctcatgttatccttttggtaagcaaatagttcaaggagggattcagatgtccatacagaatctgatacacacattcgatcaggtaaaaggaagaaaaccagctaccgcagacgaattactagactttatccaggtgaattatttacaaggttcgctctcgttaaatgagtatcaagtctactttaaagaacttcatgctcagggtgctaaaaaacctgaatacttcacgcatgaagagatgaaagccttttaatccctcttgttctatcctaccataagttacgaatcatacgtataggaaaagacatggtatgccttttcctatacgttttccatttcattcgatcttttttattttttcgatattcttcttattaatgtagaaagaatcaaacatcccaataactactatttctttatcattccataattttgtccgataaattgaaaaaacatatgcttctgttcgtgatgtttgatctcttacatatggaacaactgcaagatccacgcctaattcaataagagcattttgatctttctttaactgctttccaacccagctactataatcagcctacttggatttgtaagaaacataatgacggctactgaaatgataataccaaaaatcgcttttttcataaatgcccccctttagagtccaactcttcctactttatgaaacaaactgccttcaaatgatttatgtacatcgtgatattttttccacattattccgtttaaagacgatagacacgtggtaacaaatcatatttttggaaaggggacttcttcatgagacagcatcgaatcaatacgttaaaaccaggtgagcactataaggcaaaagaactagatagttttgtatcgacaaccgatattgtattgctagctagtaatgcttcacaacttttttctgatccagagcgagaatacaaagtggttcatgaagttgaaggattttttgaacactcggttgacgacggtgagaaatatttccgtgataaacgcgcgtatgtggttgaaaaagtctaataagatggttgatagaggaagacaaaagcacctctccatatatggagaggtgcttttgtctaaacttaatttttgggcggtcttggtccaaagaactgatagtaatgcgttttaatatcgccattgtatagcttacggttcttcgtcgctcgctttccgtaaacttcctggaagcgaggatgagaagttagaatgtacacagaccaggtatcaagacgctcacggaacgctttgcccatcttccgatacatatcttctacttcttcacgttcaccgagtcgctcgccatatggaggattaccaatgagagttccatattcaaactttgaactaacgtccgtcacttgcatttgcttgaattgaatcatatccccaaatccagcttcaagagcattattcttagaaagatcaaccatttttggatcaagatcgcttccaaagatgtgaagaggctgatcatattttgcaagatcttcagcttcaatcatagcttcttcccagcggttcttaccaatccacgcccaatcttcagatgcaaattcacgattaaatcctggtgcgatattttggccaatcatcgctgcttcaatcggaagtgtacctgagccgcaaaatgggtccatgaaaggtttatcggcattccaattcgttagcatcaccatagcagccgccattgtttcttttaggggcgcagcactatgcaggtaacgataccctctacgatgcagaccttttccgcttgtgtcgattgtaagaatagccgtgtccttatgaatggccacttctatcttaaatagtggcccatcttcttcaaaccaagaaacattgtatttttctttcaagctttctacaattgctttcttcacaattgcctgacaatccggtacgctgtataacgttgatttaacagaacgtccgctaacaggaaattctgcgttttcaggtaacagctctccccacggtagtgccttcgttgcttcaaaaagctcatcaaacgacgtaactttaaattcgccaacttttagttttacacgatcggctgttcttagccagtaattcgaacgacaaatcccaatttcatcactctcataagtaaccttgccattttctacacgtacattttcaaaacctaaatcctttacttcacgagcaaccaatgattcgagccccatggtggccgttgcaattaattcgtatttcgccatctattccactccaatctttttcgctcttctatgtaatagtagttgtattagtaatcatacaaaaaataaataagctagtccaaattgaatttaatgaggcattgcttatcacgaattcctcttaggttttccagtcaaccacgatttatagccttaacgtacaaaaaagccccataagggcttttcatcaaagatgataacgttctgtaagccatgttctgttctatcgtactgcgaacgggtctcccctcgtactcaagtggtaatcatctatctccagacgcgtcctcaccgcctggctttctctccgtttaattccttcgagaaagctcccctaccataatttgggtttctcgctcgtggggtttacctcgttccactcttaatgtttccattaagacttcgtcactgtggcactttcagagtattcgggccttatccgttaagaacttaggccgtttccccgccgttagcccaaaatggactaccctgacttattgtttcatcaggcacgaacactacgatcatctcagaccgtgcgagcatggactttcctctatatgctacttatgtgtaacatacagcgatcacccgaacgttatcattgttaggacagcaaaagcaattatatcttatattctgtttagatgcaaggttgcttagtgaaatgtttttgtttctgtaactaatagtatagtacggtaattgaaatttatcaagtcctaaaaaaataaaccaccaatcggcggtttattcatacaacttacttccaaaaacatgtttttctaaattagaaagtcgctttaaaatatcatagttcgtatttcctggttgcgtttgagatcgcgtctgctgtcgcttttgctgctcggacagtcgatccatttctcttcttaaacgcgtgttttcttgacgtagttgttcgatatcgttctcaaaacgctcataatctttaatcacgacatctagaaacttatcaacgtcgtcctggtcataaccgcgaaatccgcttttaaaatctttttcaagaatatccttagctgttaattgagtcggttgttgctcggccattttatcacctctgtatgtatgcgattattgtctttattttattcttccaaaagagttccctcttgtcaattggaatctcttcaattcgcctcattgcttgtaaaaatctggatcactttcacgtaaatcctgttctagtaaatccagatcaatcggcgtgattgtaaaaacttcgtaccctgcatctgttctctgtctgttcttcgcttcttttaagtaataatctggagaacctggcgtttcttcgtcatataaaacgagcattgcgtgacttttacgaactaaaaattcattcttcgcttttaactgccctggattttcatagggacgacttgtaatcgactcaacaaaatcagcttccgcgagtatcatattataaaaatcttgcgtcggttctttccatttgctttcttgttccaaaaatggcgtcaagacagcaagctttaaagcaggataaagctctctcaaatcaagggccacttcacccgcccagagttccactccagtctgtccacttattaaaatccattccacatctttttcttcaattagctgtgacattcttccttgcaaagctgccttaataattggaagacctggatgatcatcattaaatattcctagctcgtgtgccttataaccagtaacaagcaaaacgtttgccacttacacacctcctatgtaaaaacgaactgggagcccagttcgtttcattatttcattattttcttctcttttgagccggacttacttgaccgttcaaaccattaccattcggtccctgcatagcccctgccacttgagatgggcttgtaggtgcgtatcctgccggcatggcacccgttggacgtggtggtggatagttattcatatgtgatgctaacacttcatctgactccgttaaaggatagctatgattgtgctcatacatatgatgatgaacatttttaatatgggtaggatgaatgtgatctacgttgtgcttatagtaatgattcttcacacaacattttgtcggatatacaacaggacttgtgggacatggacctcccggaccttgcatggctggacttacctgacctggcatgccgcctttcatagcggggcttacttgattcggcatattcgcatttggtccctgcatagctggactcacttgattcggcatattcgcattcggtccttgcatagctggactcacctgatttggcatatttccatttggtcccatgcgatggtgtctatgaaacatagtgtaggttcccccttcttaatttggtgatttccctactagcctatgttcatcgcgatgtacatgtactgtgtattcgtccttatttccccaatcttcacctgaaattcacgcctatttttgaacaatgacctcattgtcactgtaattctgagctgaatcactgatttgactcattacaacgactgttaacgcaattactataaagaacatgaccatgattacttgcttcaatttccatctctccattacatttcatctgaattatttctaaaaaaactcagaaacttcaatatactactcaaagttacaacaagagacgacaattgtaaacggtgtttcaacaagttttataaaagaaatcgtcgaaagaatgccctttatgcgcttgcccggggaataatgaaaagaaataaagctatttcctaccaaatacgagattatcccttgcaattcgctgtcttatttcctcatcatgaccgtcgttcatgtccaacttgtgaaacattactaataaaagttcagcagtcattttggcgtcatttagagcatgatggcgttcatgacgatcaatattaagtttccttattaacgagtcaagctgaggattacttcgtggaaataattccttagcaagtgcttcagaatctaaataaggcggcaaatagtctggtaatccccatctttggataaggttttgcagaaaatatacgtcaaatttaacaggatgagcaacaagagttgttcctttactaaaggatagaaactcttcaaaagcctcgataaacgtccatcctgcacgaatttcatcaattgacaagccggttagttgccgaacaaatctcggaactttcttaatgggtcggacaatgcggtaaaaagactcttcaagaatacgaccttcaataagatcaactttcactgctccaattgagatcacttcatctccaatcgctggataaaagcccgttgtttcaagatcaaaaaccgtaaaataacggctacttgattcttgatataacaataatgaatcatacaagcgttcatatacaggtaatgttttgtctgtttttatttttttttgccattttaagcggtcataaagataataacgcaataatttaaaacctatggacgacattgttaaatactccgattccttcggaagcttaattcacttacctgttgcattctcttcgcaacaagtaacgcttccctcattttccttctttcttctttctcccactcaattggcctaactagattggaaatttccgaccctttttccaattgataaaggttctgtcttactcgaaaggtatacaaataatgaagagaggtttcaatattaatcacgtcacgatgatgaaaaatttcttttttctttaactcgtgtagacgtttaattgtattcacttcttcaacgccatatttcattgcaaaaatccgaattccattcacgatttgcataatggcagccttttttaaatcaagcgttttttcttttccgcgaagctgtagtttcccaagagggttaagtggaacgcgaaatctaattgtatctttcattaacagcatttgtagcgtatgtgcttttcggattcgttctgttatacgacttctgagcgctcgcgccaaatcaaagtcgccatacacagggcgaaaatccataaagatcgtaaagttacgaatttcttcagcgtccgtttccgtaatccaccgattcacttctgtttgccaatttgagagagaccgtctccacttctcatttttggccataattccgccatcacattctggcaaaccgcatgttgtaagcatcgcattgattttctctgcaaacactttaaaaaacgtttcaatttctgttttgtgttcaaggtgttcaaaatcatcgataattagaccattatcctgatctgtgctgaaagcctgttcttttcttccttcacttcccatcacaataaaacagtagttcacaggtgctcttccgtatccttctcttatcatttccttttcagccagtaaaataatgcgacggtgcatttcatcattataattggacatcatttcacatatttcataccctaatgtattggcatcaagtaattcctgaataaaggcacgaaactcttcatgaataggaggagagagattcattatttcatcaagttcttttgctcttgataagcgataagataaatcaagataagcagattcttgaatgccgagaaaagatttcgcagaaaccattcctactatgcgatctcgctttactacgggtaacagtgacactttatgaaatttcaaataagcaagcgcttcgtaactgaacgcatcttcctccacgagattgggtttctgatacatccatttatgaatcggatcctggtattgtcccatcgtaagggcattaatgatttcaagaggagtaaccgttcctaatacactctcacgatcttcactaacgattacaccatcataatttttcgttcgaaacagatccgctgtttccagtaccgtataagtaggaggaattgttaccttggaatccataatggcacttactctcgttcgataaagagcgatgttttctccatctgattcgcgatctcgctcctgcttaatttcatcatagagactacgcatccgttccccaattgtatcaagaacattatgcgaaaaagcaggattttccgtcataatctttaacattacttcttttttgatttgaatgacctgacaatcttcatttgcctgaactgaaaatgtcatcgactcatccgttaacataatcattaatcctaccaggtcgcccgggtagtaaaatcgcatcgtagcctgctggccatttgctttatgaacgatgttttttgcaatgccagtaacaaggagataaagggtatttgcatcttcatcttcgtgatataaaaattcacctttctgataagtagagaacttggcagatgccattaatttctcaatctcttcatcgctcagcgaatggaaaggttcttttttcttaagtacatcatagaaatcttgcataacaacctccaatcgttaacgcgcttccttttgctcaagccgttcaattctcttcatatacatcaaccgctcattctcttctttatcttttaaaatacgtttcttctctttccacttttgatacgcggataaagcataatatagcgctttttcatagtctttcactttatgctcataatatttggcgagttcaatgtcacagtcttcatcattcgtattctgcgataaagaaagccagatattaatagatttatgaatctgatcttgttttttgtaaattcgagcaagcgcttttttcgcttctttctcataacgtccaattgtttttgcataaagtaccgcagcgtgatcttcctctcctacagcttcccaccaacgagcagattgatactgctcttcagcgcttaatgacttcccttccacgtcgagcagaagatgagacatacgaatataaagcgtaattaacgataaaatatcttcttcgttgtgctttaacacaccttcaatgagctctggatcagggtctttcacaaattcaaaatagagcatgggggctaaatagcctggaatgtcttccttacgttcaaaacctaactgctgttcttctacattggcgagtctaacagattccatttcatttttccaaaaacgtcttgctccatgcaaaagatcaaagtggccaaattgaggtaacttcggtacttgctcgcgtattaacgtatgacgtgttttcacctgcggccaatcaaaagctttgccattgtacgtcacaaggttcttcagttcgttcacatcgtcgagaaaagccttgtacataggcacctccgcacctggtccaggcaaaaagtactgattaatagatattccattttctgtatactggctatatccgagtaaaaagatagtattgccaactccaccaccaagacctgttgtttctgtatcaaaaaacagcaaatcagaaggggtaagatgcttagacgaaagcggatgagcacgatggtggttattccagcgttccactacattttcaagctcttgaaacacataacgaccatgctgatagctagtcggatattgcttttttcttacaagtgcatagtctccgtcaagaaaatagggatgcgcatgaagctctttccatttttgaaggtgaggcacgtcaacggtgggctgctcgactttcgcttcaacttcatccgcttcactcaggttcatatgctttttcattcgatttaatttagccttcagtgacatgagaatgttcacctcttaagtattcaagtaaatagatagccgttttcttgctattttctcccgtttcacctgatactccaacacaggatgggcagccgctttcacattcgcaattcacgacaatcgattccgcttcctttaaaataaagcctagttctttgtatactctttcggataatcctattcctcctggataacgatcatagaagaatacggtcggcttgtttgaatgcacagctttaatttgaggtgtaacatgcaggtcagacacatcgcacatgacgaagagaggagcaacgtttcgaaggacattaccaagaccgagtaacccctcctccaaacgattttctcccattgtttggacaaagctttccgggaaatcaaaccagcatgcattcgtatgaagctcttcttcaggaagatgaatgggaccagatccgatattttcatgcgtctcaaatttaattttcttaaaaattgttgccattgcgttgaccatcacttctccataagtagctgtagtatgcggcagtgggtcatgcttgtcttcttccaaaaccttcagctgcacagcaagattagcatctgtatagtaatcgacatccacttctcggacccacgcctttttttcatcatagtcgagcagttccacttgatattgcacaccctgatgaagataaatcgcttcctcatgaagaagtgtcatggcactaaaccgatccatttctccaatcacttttacattcgaagctgtcgtttgatcaataattactacattttcttgtgacgcagagcgaaggcttacgttgtgagctgggaaagcatcattcatccagaaccaccgatttgcccgatgatgtaggagctgttcatccgttaaaaactccagcacatcttcaatgttttctccaccaaacgtatctccttgctgaaaaggaagctcatatgcagcacattttacgtgatcaacaagaataattagattattagggtttactcgagcttcttccgggttccgttcaaaaaagtaatcaggatgagtgatcatatattgatcaagcggacttgagcttgcaacaacaaacacgacagattcatcctggcgacgccctgcacgaccggcttgctgccaggtgcttgcaatggtgcctggatatcctgttaaaacacacgcctgaagttgaccgatatcaacaccgagctcgagagcattcgtactaacgacacctttaatatctccgtttcggaggcctcgttcaatttctcttctttgtttaggcagataccctcctcgataacccatgatggagcgcggccctaactctcgctgttccaactgttgcaagtaggtgagaaggatttcaactcgcacacgactccgtgcaaaaacgattgtttgaatgttatttttcaaaagctctacagctaaatttcttgcttcaagcgttgcggaacgcctgatattaagcgcctgattgacaacgggaggattataaagaacaaagtgtttccggccggtaggcgcgccattgttattaattaatgtaatttgttctccggttaactcttcggcaagctctttcggattcgcaatcgttgctgatgtacaaataaaaatagggttacttccataaaattgacaaatacgtttcaatcttcgaatcacgttagccacatggcttccaaatacaccgcgatacgtatggagctcatcaatcacaatcactttaagattttcaaatagtgaaacccactttgtatggtgaggaagaatagcagagtgcagcatgtctggatttgtcataacgatatgccctgctttacgaacgatttgtctaatcgttggagacgtatctccatcgtacgtgtacccttttaaatcaacttccatctcatcaattaattcattgatctcactcttttgatcctgcgcaagggcttttgttgggaacaaataaagagcccgactagaaggatctttcaatatcgtatctaaaacaggcaaattatagcacaaggtttttcccgaagcggtcggtgtaacagctacgaagctgtttccttttgaagcctcatcatatgctgttgcttgatgggtgtataattgtttcacacctctttcttcaagggctttctgaagctctggctgaagccctcgtggaaaaggcattgttttcgcttccttcggttcaatcgttttccatgttacgatattagaccgatacttttcctcctgctgaaacatctccagaagctggggcagtttcttttttctatccatccgatcacctcaaaaattattctatgtctattgtagcgaatacgcgttcgaatggataccgttttgattggaaagtccccttttccattaccttctaacgatcgatcgaaatacgcaatcaattctattttgatccatcacacgcctttcttttatgagccgagcttttttctctaattgatttaactcttcttcaagattacccattaagtgttctggctcactaagcgtttctcttctgaataacgtctttccctgcatttttatatgatcatgaaccgatgaaacttggagaagttgagggagagttaaccggggaaggctttcattctccaaaatccaccttccgaaaagaatcgattttaaagcatacagcatccctttttgatcggaacgttcttcctgtgcttttaaatttgttcttcccatctttatataatgaaacaataatggttttactaaaaaacaatcattgcttaattccctaagcattttcacttcttctgcttccttataaatagtcggtgaaatcaaccactccagaatggaaggattcgatttacctattaaataaagcgccttttttatatcccatccatggagttcaacctttccactgttcacttctaaaacatcagtcttaggaaacaccgttaaataccaggctaaatcatgcgtgtagataaaccgtatatcacgatcactgttctcattctcataaccgaaagcgcgactccccgcttcacatgcaaataaaatggtgatcttattcttttcttctaactccttaagcgttgttgtgatcgtgctcatgacataacctctttatcgacaaaaagctaccaggttcagcccggtagctttttcgtttatttttgcagttctttcatgactttatccacgtccctctcaggaagtgaacagctgaaattctcacaaatataaatggtcgtttcgtttgtcttctcgaagttagcagcgaatggagctgcttcggttagttccgtcggatcttctacgctaatgaccgttagttcaggtaaaaagttctgccggagaaactgttccaatctcttcttatgctgatcacgatttgaaccaacaatgaccacttctttagaagaagatcgtgcgtacagcttactcattaagaaataagcatgaccacttgaatacgatgaaacatcacctgaaaaagcagtaaacatccgggtagcccactcatcatatttcatttctccagttaattttgataaacgaagcaactgaagaacagcaacgctatttccagatggtagggcaccatcgtgaacatctttcggtcttgcaatcaatggatcggcatcatggccatacaaatagaagcctccagaactctcatcccaaaacaattcgtgcatatcatcagagagctttttcgctttaacaagatattgtgagttatacgttgtttcatacaattcatttaacgcccagagtccatacgcataatcgtcatgatacgctttgaatttcacttctccatggcgataacgagccattaatcgaccgtcaatgaccatgttttcttctataaatcgatacgacttttcagctagttctgtgtatccagcgtcttgaaacacccctcctgctttcgcaaaagccgcaatcatcaacatgttccagctcgtcagaattttgtcatctttatacggatgaacgcgtttttttcgctcggcataaagtttctttctagctgtttccagttgagtttgaatggctccttctgtcaggttgaatgatttagcaatctttgaaagatccgttttgattaagttaggaatgtttttcccttcgaaatttcctcttgccgtgatgtcatacacctcagtgtacagagagccaagttcttcacctaagattgtgtgaacttcttctgctgtccacacataaaacttgccttcttcaccttcagaatcagcatcttcagcagaataaaagcctccatcatttcctgtcatgtcacgttgtacgtattcgagtatctcacaagcaactcgtttgtagcgttcgttcccagtgacttgaaatgcttcggtataggtaagcgcaagcatggcgttatcatacagcattttttcgaaatggggcacaagccattcctgatcgactgcgtacctcgcaaaaccaaaccctacgtgatcataaatgccgccgttcgccatagcatcaagcgttctagtaaccatcgttaaagcgagatcttgattatattgacgataatactgtagcaaatacatcagcatatgaggagaagggaatttcggggactgaccgaaaccaccaaatatcgtatcaaaggaattttgcatctgttcaaacgctttatgaagcggctcctctgttaattccccaccttccgtattcattcgttcttgcaatgacgcggttatcttatctccaattcctgtaattctctcaggattttccttgtattgctgataaagctgcatgatcgcatctttaaatccgggtagattgtatcggctttctttcggaaaataagttcccgcataaaatggtttttgatcaggcgtaacaaaaacattcagcggccacccgccctgaccggttaatccctgacaaactttcatgtaaatggaatcaatatccggtcgctcttctcgatcgaccttaatcgctacaaagcgatcgtttagaagctttgccgtttcctcatcctcaaagctctctctttccatcacatgacaccaatgacaagtcgaatatccaattgaaacaagcacaggcttgttttcgcgtttcgctttctcaaacgcttcatcaccccatggataccagtcaactggattgtgagcgtgctgaagtaaatagggcgatttttcatgaattaacatattttcgtacggctgatcgttatttttcaattggtcaccctccgtttcttaacttcattctcttttcagtttaccaaaatgttgtgtaaaaacaaaaataagcgggatcaccgctcatcatatgttttctcaatataggcttgttcctcttctgttgtcattaatctttctgcctttccaatcgttcctccatttaaattccaaatgtagttatggacatcaactgcattattaaagtttcctttatcccattctgttaaagcttccgtataaaaatcctggtacttatactcttctggcgttccttttactttatctagcacctcgaacatattatcaatccgctcttctgaaatttgatagattccccacttatcttctgcaacgactttttgatgcgtcatcccatggatatagtcctgaaatttattttcacttggtattccatctgatgtaatggattcttctccattatccacgtagcgctccggatcaacagatgacccagtttcttcacttatggcctcggcttcctccgctttttcttttaaactccaatctaaatctgaaataaaccagtaagttagtccaagtataaggaccaccattgaagaaattgaaatgactaacgtttttgttgaaggcattaattgagacagctccttaaacctatttattccattatatttatgtacgatagcgttgaaattgctaatatccactatgcaccaaagggtatttatacctatttttacatacatttctataaaaacaagagaaataaccgtattttctgaacttttccctaaaaattgaagaactgaatgctttaactaggcatatggataagcatgtccagtccctgctacataaagtattgatagataggaggtggtaatatgggaaatcgtcgaagtgcaaataaccgaagatcaaatgttaaacgaagcaaccgaactgaaggcgaaacaagagggcgcagaaacggacgctgtggtgatcgagataatgacacagccggtcgcgaaagcgctcctagctgttctcgatactgctccaacgtttgtcgtcgtttattcccgttagatttcacacgttgttttaacgattgtgtctcgtgtcaggaagatgttctttttgaaacggatcacgagttttacgaagattaatcgctaatcaaaaaggacaattccgttttataggaattgtccttttgccttctctaaccattaaccgagtatcaattgaccatgaatattccaattaaattgatctgcacatagccacgctgtaagagtttcaatatcatctgaaaaaacgcgatcttcctcaatcgacgatacgattgttcttcctattttatataacttctgagcagatgtagaggctaatgagatgccccgaatttctaatgcttgaatcgcacatatcatttcaatcgccaccactttctgggtatttcctatgatttgataagcatgacgagcaccaattgtccccatacttacgtgatcttcctgattcgcggatgaggggatgctatctacactcgctggatgggcaaatgttttgttctctgatacgagggatgcggccgcgtattgcataatcatggcaccagactgaagcccaggatccgggcttaaaaatgccggcaaatcatttagctgaggattaacaagccgttccactctccgttctgaaatattagccatttcagctacggcgattttgagaaagtccatcgcaatggcaatgggctgaccgtgaaaattcccaccagagacgaccgtttggccgttttctaaaataagaggattatctgtggcagcgttcatttcaatctcaagcttttcttttacataagctagactttgtcttgaagccccgtgaacttgtggcatgcatcgtaaagaataggcgtcctgtatgcgtttttctccttgatgtgtcacgagcttactatctctagttaactttcttattcgctcagctacttccatttgttcaggataccctcgtgcttcgtgtatcgctggatgaaaggcgtcaataattccttcaagtgcttcaagcgtcatagcgccaatccaatcgcactgatccattaaacgctcagcttcaatatagttgatcacccccatcgccgtcatcgcttgtgtaccattaataagggcaagtccttcttttgcttttaaggtaagaggggagatccccagttcatcatacacacatttcgtttgtaaaatactcccgttataatgaacttttccttctccaacaagaactaacgcaagatgagatagcggcgctagatccccggaagctccaagagatccctgacttggaataacgggaataatttcttcatttgctagatcgcaaagacgttcgacaacacatgggcgtaccccggaatacccttttaataacgcattcagtcgtaacaccaccattgctttactaactggttcagtaaaatactcccctaccccgcaagcatgagaacgtattaggtgaagttgaagagtatcgacatctttatcctgaatccgaacgtcgctgaatttaccgaaacccgtattaattccatagacagtctccccacttgccacgattctctcaactgctaacctgctttttataaccttttccatactgagcgggtcaatcgcaattttttctccttcgtaaatgacacgtttcatttccattaaagttaacatagagccatttaaatgaaccatacctatcgccttctctctatgaaattgatcgtctcaaaacaaaaagaggcgacaatggaacataccgttccattgccgcctcctcatcactcattactttaggcagcttttatcctatatgattaattccgagaccaaacgtttcatgttcaagcccttttactggagccccaattgttccataaaaagccacagcaatccattctccttcatcaaaatgctcataaggtgagccacgtacaatagcgaaacgtaagcccacggtccgcatcatatctcctgcgcctatctggccacgcataaccccttccaatgcctctaaaatggcatgatacaaggcatgcgtctctcgataaagctcttctgaaataatcttattccttttagcagatgtttcaacagctgagattactttctgcatactcattgatccagactttccttcacagtaatccacatctttcagctgatgagaaaatggttctaactcttcaggagttaatgatgccacgagcatcgctaatttaccaatcagtatcttttgtgtcatttctctcacctgtccacgtttctactagttactaatatccaccttcattgtaagcgttatcaacactagtggtcaagatggttcctttcgtttacaaactccagttaaaaatgaaagcattgtatgaacggcacttttcacccctatatctcttacatcttttcgaggatcgaggcaaacgatgtccatcgccttcactttcggatgctcacccgctaactggacagcgtcaaacaactcttccgttctcataccacctggcgttgctgcaggtgctgcagggttaaaagtaatatcaagaacatccatgtcgaccgttaagtaaatcgtgtcaacggttttttcaagttgagctaaggcatcttgaacgacatgatggataccctttttccttactgttttcatcgtcgtgtaatgaacgccatgttcatcagcatagttttttaactctaaactattaaaaaaaccgtgaagtccgatattatgcacatgctttccttcaaccgtatggctttctattacctgccgtatgggcgtaccattggcgggacccaaatctgataagtctcgcaaatcaaaatgtgtatctaattgcaaaatgccaatcgtctcattttgatgcacctgcttccagcctttaatcaacatggctgtaatcgaatgatccccgcccagcgttagaggtattgtatttcggtgctgttctctcatcgctaccatagcctgttgaatttgatcatgggtatatcgtatatctgtcgcatgctgtttgacatcaccaagatctatcgcttttaaacgagcaagatcaatgtcttcgtcaagattatacgtacgaaatgaacgccatgctcttcgcatcgcatcaggattctcacttgctgcggatgtactaatcgatgactttgataagggaacccccagaatggtaatgtcgtagtcttgccaatttggcgttgattctcctatcgtttcaatccattcattcaccgtaagatcacattgttcatccgtttgctttgaccaaatcatggttgggcgatttaacatcgggtatggatatcccctcataaaaggtgtcctcccacaacgagcggcacgcctcctttaatcacagtgtcgacatgattcattccatattggtaggaaagtgtaaggtaattaggcacattaaatattgtgatgtcagcttttttaccaacttcaagactccctgtagtatccgcacagccaaccgcatgtgcagcattaatggttgtcgcagttaatacctcttcgggcgtcatctccattttcaagcagccaagattcataataaaaggaagagagagtgtaggagatgaaccagggtttgcatccgtagatagtgccacacctactccagcatctatcatctttcttgcttgagcaaaatcagccattagaaaaaacgccgttcccggaagtagtacccccatcacgccagcttcagccatatcctttattccctgatctgatgctcttagaagatgatcagccgaaatagccccaacggacgctgctaactcagctcctgcataaggttcaatctcatcagcgtgaattttaggaataagtccgtattctctaccagcctctagtatgcgctttgattgatctggggtgaaaacaccacgttcacaaaaaacgtcattaaactttgctagcttccgattggctacttctggaatcatttctgaaatcactttcgacacaaacgtttcgggggtactcttttctgataaaggaattgcgtgcgcacccataaacgtggaaatcacatcgatcggatgagattcatgtagttgtttcgcaacttctaattgttttatttcatgttctaatgtgagaccgtaaccgcttttcgcttcaactgttgtcactccgtgtaataaaaattgattcaaacgttttctagactgttcaaacaattcttcataacttgctttttgtgtcgcacgcgtagtggcataaatgccaccaccagcttccataatttccatgtatgtcttcccttgtaaccgcatcgcgtattcattttctctcgtaccagcatgaacaaggtgcgtatggggatcgattaaccctggagctaccacttttcctgcggcatcaatttgctctgtaagtgccactgaatctttgtatttcgataccatttcgttcgatgatccaacttcaacaatgattccatcttctatatagacagctccattttcaattagtcctatttgtgacattttctcttttattgctggacggtccgagtaacctgacattgtgatcagctgtgcagcattttttattaatagtcgtgcagtcatatcgctctacctcctatttctttcgtaacatcggaacatgaatgcctttctcctctgccgttttcttcgctaaatcataaccagcgtcaacatgacgaacaacacccattccaggatctgttgttaaaacacgttcaattcgctgctccgcctctttcgttccgtctgccacaataaccatacctgcgtggagcgaatagcccatgccaacaccaccgccatggtggacgctaacccaacttgccccaccaacactattaatcatcgcatttaaaatcggccagtcagcaactgcatcacttccatctttcattgcttcggtctctcgattcggagaagcgacggagccagagtcaaggtgatcacgcccaattacaatcggagcacttaattccccgtttgcgaccatgttattaatgattttcccaaactttgctcgttccccatacccaagccaacaaatacgagaaggaagtccttgaaagctaattttctctcgcgccatacgaatccaatgacaaaggtgctcgttgtcactaaactcgtttaaaatcacttcatctgttttataaatatcttttgggtctccagacaaggctacccaacgaaaagggccctttccttcgcaaaactgcggtcggatataagccggtacaaatccaggaaaatcgaatgcatgttgaacgccttcatctttggcaacctggcgaatattattcccgtaatcgaatgttacggctccttgcttttgcaactcaagcattgcctgaacgtgtatagcgatactatgttttgctagtttactatactgttctggattctctttacgaagtttccctgctgcttttatatctaagttaataggataatagccgtttaaaggatcatgggcagaagtttgatcagttaaaatgtcagggataaatttatgatcaatcatcttaggtaacatttctgcggcattaccaagtaaaccaatggaaagagcttctcctttattccgggatttttttgccatttcaatcgcctgctcaagactagcggttgacgtatcaagatagttggtatcgattcgacgctgaatccgtttttcatccatttcgattgcaatacaaactcctccgttaagagtgacggcgagtggttgcgccccgcccatccctcctaagcctgctgttaacgtaatcgtatttcttaaactaccattaaaatgctgcttcccacattcagcaaaggtttcatacgttccctggacaattccctgactgccgatgtagatccagctcccagctgtcatttgtccatacatcatcaacccttttcgatcgagctcatgaaagtggtcccaatttgcccaggcaggcaccaaatttgaattagcaatcagaactttaggcgcatccttgtgtgtcttgaaaacagctactggcttcccagattggatcaacagcgtttcatcattctcaagctcctttaatgaacgaacaatcgcttcatagcactcccaattgcgcgccgccttccctattcctccgtagactacgagttcctctggattctcagcgacatcaggatgcaaattattactgagcattcgtaaagcggcttcctgaatccatcctttcgtgtgaagaactgtgcctcgatactgctctactttgtttggttttgtatccgtcatcatcgtcaccctttcagaatcattttctaataaaagcgtagcatctgatgcagaaacgatatagactaccagatttcgaataatagcaaatactttataaacaagaagatcatttcgttaaattccaaataatttgtagtaatttctttagaaaagttaattaaactacttatctcctttgatttaaggtagtgaatcatgagtaatgtctataagtgaacgatctcttcacataaaaaatcatattttatgtaagctcatgtccttcttacaatgagttaattttcttatacaccagtctattcatgaatctaaagaaaatttggtgttaattatgatggaataatgggaagagtatagatggttgcattatgaagtatagaattaaaaggagtggaaaaacatgaacaacagtcaattcgacaaaatcaagaacggaacaggatttattgcagcgcttgatcagagtggtggaagtacacctaaggctcttgcagaatacggtgttcctgaagattcctactctaatgaagacgaaatgtttgatcgcgtccatcagatgcgaacaagaatcattacttcacctgctttcagtggagagaaaattcttggcgctatcctatttgaacaaacgatggatcgtgaaattgaaggcaaatatacagctgactatcttgcagacaaggggattgtccctttcctaaaagtagacaaaggactagccgatcaagaaaatggcgttcagctaatgaaacaaattcatgatttagatgaaacgcttggtcgggcaagtgaacgtaaaattttcggtacaaaaatgcgttctgtcattcatgagccgaatgaaagtagtattaaagcagttgtagagcagcaatttgacatcggtaagcgaatacttgctgctgatcttatgccaattattgaaccagaagtaaacattcacagtgaagacaaagagaaatcagaagaaattttacgcgatgaaatcctaaaacagcttaatgatttgtcagaagatcaaaatgtgatgcttaaactttcgattcctacaagagcgaacgcgtataaacagttaatcgagcatcctcgcgtgttgcgcgttgttgcgctatcaggtgggtattcacgtgatgaagcgaacgaaaagttaaaagaaaacgatggtcttattgcaagcttctctagagcacttgctgctgatttaaacgctaatcagtctgaacaggaatttaacgatgctttacagagcgcagtggactctatttacgacgcttccgtaaacaaaaaataataagcactaaataaaatgggtgaggatacaaccgggtatcctcacccattcttcatattcacatgccctcttttcgatattcaccaggtgttttcccagtggattctttaaaaatccggctaaaataattcgggcttttaaaacctacatgacttgcaatggactgaatggattcttctgttgaggtgagtagctctttcgctttatagatacgtgttgaacttagtatttcacgaaacgatcgaccgtacctttttgttaaggtgtgacttaagtaagctggattacgaagcacatgatccgctacttcaattaacgtaagagcgggatcatggtaatgatcatcaatgtaagttaaggtttcttcaatgacatttctttttaaaacaggacggtcaactgattcatgtagaagatgcgtaagaaataggatcaaatcttgaacgatgcgataaagaataggactgtataaaatcgattcaaacacctttttatataaggcttcacttcgattatcggtcattcctttacgaatcataaatcttcttatttgagctaggatactcgttaaacgcgttcgcaaaagtcctggctctggataaggagattccatgccataaaagtgctcatacatccaatttttcaattcttcgatacgactttcctcaagcatataaacccaatgacgctgttccgttaacgttagaaaaggatcaatatcatgccactcctcgtcttgatcggaatgaagaacttgttgataaccagtaaaaaaagacacctccattacctttcgtaatttcatataaatttgatgcaaggaatgctcggtcattccttgatgcactgcaatgacaatggagtctccattcatctgctcccactcacgtaaaaactgctgcgcctgatgaataggttcatgtatcagttggtcaaaaacaaggacaattcgatccgttgttgagaaaacaagtggcgtagatgaaaagttaaactgatcaataaattggcgtaactcactgagaaagcctctttcctccgttttcattaagtaaactggagcgcgataagccaattgatcatcaataaacaaggatttataccaaagtgtttggtgtaactcttcccctttctctttccttttgaaatccgcaacattccgaaaggctttctgtaaagaggtctttattttcaagggtgagagcggtttcacaattaagtctaatgcgccgatttcaatcgcttctgttgctttttcaaaagttggctcggctgttactgcaatcacttccgttgtgtaacgatcaataaacgttttcataagattccatttatcccgagggatcatgtccaattcaatgaaaagaatgtcaggtaattctttttctaaaaccttcataacctctgtcaactgattaaccgtttcgactgatgaaataggaaatgaatactttgagattaaccatttcaatccgattagctcctgggaatcacgatctccaaccactagtttgtacataagtcatttgtccctgcttcctctattccattttcatttacacagaagagattcttttatttgtctcatctatccccttttattttgtcaaaacagataagaaacctcaatattttttcttccgttcatttacgtacctaaacaaaaaaaggacttgctatgcagcaatgatccttatctcgttagcgagctttctctccattaccaagtacagctgtaacgccccaaaccttatcgtatgccccatatccatttaatccaatatcgaggtcatggaaataacgatgaagtttttgaacatctcctgtagtaccatgttcaatatagtgtaaggcaatgagtttaatgtcctgtaggtcttgattgagctttcctttttcctctttcgaataaacattaacgactgacactatttcaatcgctttgtcagtttgatctgcatgattgagctttgatatttcaccaaatccagtcgtttgattgtaaaacgcatgtgtcgaagcaacaaaagcattcacattgtcatatgcgagatcattcgaaagcgctgacgcaattttttcaatatcctcttccccgtaatctggtcgatcctctataggaggagcaatccattctttactcacagagagtgcgcgctcgttaacagaaaaaaggacatagatggtaatggcaagactcgctatcgtcgctagaccaagcaaaataaatttcgcttttgtagtaatcaaaacatcgcctcccttcttatattgaaagaaacgttgtcttaacgacacaaaagcgatatctcatttctgattgatatcgcttttgtttatacggaatcagagaagctccacaccttaatgatctcctaaggtttcggttaacccaaacgtatcctcgtgatcatagttgttcagagctttgtcgagatcatgaaagtaccgatgaagtgcacgaacctcagttgttgtaagggtttggctagaaagttcctttatggacattaagtcttttgttagatcttcatgagctaccccgttttctaaaaacacatcaatataggctacggcagcagaggcttgacgctcctgtgcttctagatccataggacggtcaatcatcccgtagcccgttgttcgattgtaaaaagcatgaaaatccgcaacgaattcttctacttgctcgtattctgctgggaaagaagcggcagatatttgataatcattctcctcaacatttgtcccatttacctcggtgtgaagtgagaaaatataaatatagagagccgcgaatgttgcagcaacgaggagactgattatggaaaacatcactttcgcttgatccatttcatcttcccccattcgaatttctctctactctaattctttatttagcaaaaccgaaaatatttttgattttagtaacgccccacttcggatcatgtgctctgctttcgtcccggaaacgatcctgcacaactgccattagtctttcttctcgcgccgacatctgttcatcagcaatttgtctttctttcgttacttcaaattgatagaattcacgttcgtcgactgaaacatcagctaagtgatcgattttcttaccaatcgcatttagctccatttggttaatggatgcgtgtgcgtctgaagcagtggcgatttcttcatgaacaatttcatgaacttgatgaacgatatctttttccaagcgcttaacggtttcatccatactaagaagtttttttacttcttctgattcaacaaaagaaacaattttggataaagaagtctgaatatctacttgctcaataggctcgctaggcggcgttttttctgcttcctttccctgtagttctaacgtattgataatgacttcatcggcagcatgactttctttcatgtttttaattaattgaaggacttcaatatcaccaattgtatacgtacgggcattgttttcatcacgtggaatcgttagaaatggcgcaaattgctcttcccataatttcaatgtatgacgagacacattcaacatggaagccaccctggaaatcatcattgtattattcatctacatcattcctccccgttgatttaataaaggtattccatgcccatctaactattttcctgcaagatgacaaaggttcttataaacagtcagagactcttaggaaatagcgttaatctacaaaagcgctcgtttgttgtaatgttttgaaatggattattcgcttttctcgaattatgacgtgatctaatctagcaggctaattttgtctgttttgactcattttcaaacataaaagaaagcgttatcataacgagttattatggtaatatatagataaaacgaaatgggggaagttatgagtacggtttttacacctgtaaaacagcctaagttacagaagagaaaatggccgtattaccttactggaagtatcttattattaatgattctcgctttagccatcagtttttggtttgtacagagaacagctcctgaaacaaacggggaaatcaccttatcaggcttagaaggttctgtttccatttatcgagatcgttcaggcgttcctcatattgaggccacatctacaaaggatttatttattgctcaaggatttgtgacagctcaggaccgcatgtttcaaatggacctaagtcgtcgtcaagcttctggtacactaagtgaagtcattggtgagtcaacgatcgacaatgacaagttttttcgtacgctaggcttaagaagggctgcagaagattcttataccgcctactctgatgaggcaaagcaaatactcgagtggtatgcagatggtgttaacgcctatataacacaagcaaaagcggagaattcactgccaattgaatttacacttgcgggttatgaaccaaatgcatggacaccacttgactctcttacaattggaaagtatatggcgtttgatttaggtggccattgggaaggtcaggcatttcgctactaccttcttcagaatttctcagaagaagaagcaatggatttgtttccgagctatcctgatgaagggtctactgttattcaagaaattaaagaaagtcagttagatatctcaaaaagttttgctaaagcggttatccctgatccgtttaacggaagtaataattgggtcgtatcaggcgcaaaaaccgcttcaggaaagccgcttctagccaatgatccgcatcttggcctcggtacgcctcctatctggtatgaaacacacttaaattctccagattatcaggttagtggcgttatttttgcaggcgttcctggaattatcgtgggacgaaacgactcgatcgcctggggagttacaaatgttgggccagatgttcaggatctctatattgaaaaaagaaaccctgataatcccaatgaatttcaatataacgattcatgggaggaagcagaagttcttgatgaaagcatacctgtaaaagacagtgatccgattccatatgaagtcgtgattacacgccacggtccaattctttcagaatttgctcatgacgatcaaccagatacagctttatccctcaggtggactgcattagatccctcaaccgaattggaagcagttcttaagatcgatcaagcgtctaactgggaagaatttaaggaagcgctaacttcttttcatacgcccgctcaaaattttgtgtttgcttccactgacggaacaattgcttaccgagcaaatggactcattccgattcgtaaaaatggcgatagcatgctgccagtccctggttggaacggtgactatgaatgggaaggttatataccctgggaagaacttccgacaatcgttaatccggatgaagggttcatttctaccgcaaataataaaattacaacagatgactacccctatcacatcacccatacgtgggctcaaccttatcgtcaggatcgtattcgacaagtattaattgacgggaataaccttgaggctcaggatatgatgaaccttcaaaatgatttcgtgaatttacagggaaaagagctcactcccctattaacaatggaactttatagagaaaacttgacctcagtggaaaaagacgctctctcgcttcttcaagagtggaactatatcgatggtagagatgaagccgctccccttctctttcatttatggttagtggagatggaaaaggtgctatttaatggaaagattgacaaagaaatgatgccccttttcgatggaaaaagtcaagtcgttgaccagctcattagacgagctgtgaatggtgaagaaggaccttggatggagaagtctgggggatttcaacccgtagtaacgaaatcctatcaagctgccgttgatcgcgcagtttcattacaaggacatacacccaagaaatgggcgtggggaactttccattccgtgccatttgaacatcctcttagtgcgataaagccattaaatcttctcttcaatccagaagtgaacgccatgggaggtagccgcgtaacagttggcgctgcaggttggaattcatcaaccggtacggttaaccacggagcaccctggcgaggcgtcacggatttagccaatatggaaacaagctataacgttatatcgcctggtcaatctggttacgtatttagtgaatggtacgacaatcaaattgatgattgggtaaatggacgttaccacgaaacgaagatgagcggttatgaagaaaacgcgaagcatcttattcttaaaccataacaaaaggctctctcaaatgaatgagagagcctttttgtttgctattttacggatacggtccaattttgtgtatcttctaacttccctgtttgaatacctgtaatggtgtcatacaaactctgagaaagttcacctatttcatgattgttaataaccattttcttaccttgccagttgagttctcctactggtgaaatgacggcagccgttccagtaccaaatgcttcctcaagctgtcccttttgcgacagctcatacagctcttcaatagacacctttctttcagtgactgaaatatcccatttctttaacaattcaataacggacattcttgtaatgccgtgtagaatgctaccgtttaattctggcgtaacaacttctccattaatcttaaagaagatattcatgctccccacttcttcaatataacgcttttcaactccgtcaagccaaagaacatctgcatttccgtctttataggctttcgcctgcgcttgataagcggatgaatagtttccggcagtttttgccattcctgttccgcctttaacagctctagtgaatttatcttctacgctaattttcactggtgttaagccaccagaaaaataagagccaactggtgaaagaatgatcattaatttgtacgtatttgaaggagcaacagataaatttggctccgttgcaataatatacgggcgtacataaagcgatgttcccggagtcgatggtacccaatcttgctcaatgtgaatcaattcttttaagtaacccatcacacgttcctcatcaattggagggatgctcaatcggtcgcttgaaagattcaagcgctgcaaatttttctctggtctaaataaaaggatacgatcgtcagaacggtaggcttttaaaccttcaaaaaccgtttgaccgtagtgaaaaatcatcgcagcaggatcaagagtaattggctcataaggaatgatgcgtggctcaaaccaccctttatcggtttcataatccattacaaacatatggtcggtaaacgttcttccaaaagggatctgatccttttcaggcttcgcttttaaattcgtacttttaacaatttctaaatctgtactcatggccaggactccttactcatttaaaataatattcataacttatgttccttccacttgaaggcagcttactatttatctattgtactgccaaactctatcgaattaaagctttatagtacagaaagatgaaaaaattcagtaaaagatgtttttcttcataacttttttatctttcaacgcattttagtaaattcgactgcttcactcaaaaaaaagatattctttattcacttttttgtaaacgataccaaacaaacaatagcaccattttagttttcaagactttgttttctcgtttacgattagtgaatttactattgcaactgatgtctttttcacgtaaattagtcaagtatgtttattaggaggtctcatcatgaatcaaacacaaaacacgcagcgcgtgcaaatggtaacagcagatccatcggctattggactgtttggtcttgcaatggttacgcttgtggcatcatcagctaaactaggttggacagacggtgtatcctttgttctaccatgggcgatttttctaggtggaattgctcagcttattgctagtttcctcgatgccaaacacaataacacgtttggaacgactgccttcgcagcttttggtctattttggctaggtgtcggtacatcctggttaattcaattcggagtttttggcgatgcagcggcggcggctgttgatccaaaacaattaggcattgcatatatcggatatttgatcttcagtgtctttatgacagtgggtgcgatggaaacacataaagttcttttctttatttttgtctttattgatttcttatttatcggacttacattctctactttaggaattttccctgaaggaatgcacttcttagccgcaattgctgagttctgtattgcaatcttgagtttctacggttcagctgctagcgtattaaatacccatttcggcaaggtgacactacctgtcggaaagccttttggtattttcaagcaggcttagtataaaagacagatgaaagttaactttcatctgtcttttttgtatcactatttgctttttgaacgagcttattatgctaaaccaccatctttccgacgctttccaagtaaatgagcattctctttgccctctaatcttaaatcagaatctttcaacccatgaaaatgatttttttgtttcattctgtttcaccatgatgagttaggtaaattttcaacatataaccccattagtttacaataatatcattatgtaaaagttgttctttcttgaaaatatttagcgcatttagaagattttgtattcgacgaataaaatagaggcaaaggatccagatcccaagcctcaccagctgttcttattcatttaactgattaatctgatcaatgacatcattaatctctgttaaggtttgaaatgcctccgtattttcaaccatcgaaggatccaaatttccatcttctatattctttaaaaattgatcaattgtattcaaagctttttcatttcgatcaacaatgttttgatggagttccgctccaactttcggcgcttctaacttgttaaattcctgtatatctttcttcatctcttcaagtcgactttcaaattcattcaatgcctgttcatcattaatcgcctgtttggctaaagtaggagcttcattcgcaaaaccactcgcctcactagcgtattcacgtgcctcatcgacatagtttagcgtactgttcacatcctcgagaaaagaacagcctccgagaaataagattgtcgtaacaaaaacgatcgctattttcttcatttgtattcctcccttaatttccggaacataggataggctcaaaacagatcatctttcatgcttagcttttatacgaatcagaaaaaattaggtttcattaacagtgaaaatcgtctcatcaagcaaaggcgcccttgcataggacgcctttcaattatgccggatgatttcttattaattcatcacttagtttcattctcatggccattcgaccacgatgaagacgagacttcactgcacccggtgatagctttagtttttgagcaatttcactttcctttaactgatcataatagtggagtttcatgactacccttaatttaggtgatagcatatgaatttttcttttcatagtttcttcaaaaagaatcatctggcaatcttcttctacgttacaatcgtgatcgatttgattcataagaacatcttctgttttaaacaacgtgactcttttttgttttcttaattgatcaatcgcttttcgtgcagcaattgtagaaagccaggaacctagcttctcttcaccttgcacctcttctaatcgatcgtatgcctttaaaaaggtttcttgtagcacatcttcagctagaccatgatcttttacgatacttaatgcagtgtaataaacacgtctatagtgtttttcaaaaatttcactaaagcataaatttatcaattcgatcattggtgttgatccttaaaataatctttgacaaagtctggagtttttgaagaatttaaggctaacacttcataataaccaccctgtaaatcgtcataatgaatgccaactaaataatctccttcttcgtcctcttcgctacttaataaaatcgtttggatttgcttctttttctttacctctaaaggcttaacggattcatttttgacgatttgatcataagcttctcttggatattggttctgagcttcattccgcggataaatacttacatgatcgatctcaccttcgtcaataaaagcatcctcataatacccttcctctttcagccaattaacagtgttttcataggagttataaatcgaattgtcatgaggataatagtattcctctgtccaatctgaaccatttctaacttcagacacgtgagaacgaatgcctactggatgaatgatgtcttcataggatagggcataaatatcctctcgtacatgttgataaaattcttgtatttgctttggctcaagtatagatacttctgtattaacgggtcttcccggttgaagagtgactttttgaacttttgatgtatcactatttaagaccgggtaagtcaattctttgtagtcttctgtttccattacgcgtttcagtgatgcttgaacttcctttcgatcgatttgatacgtacgttgaacgtgatcaccattttctaattcataagagatgaaatacattttccctctagaattaaactgatcgttcttgttaatcatctctttttgtaattgtattaccgcaccaattgcttcttcagattcaattaaatcaggtgaagtatttgccataagatcctctagctgaaaaacactgtcaccaatatagacatttttaatattactcatttcaggaacgtaactttcatagtttaaccagaataatggcaaaatccctatgattaaaccagctgtgccaccgtaaacgaacaagcctttaagatactgcacttgaaacacacgccagcttttatccaacaccattgaagataagaagtatccgatgagcccacctacgacatagccaaaaattaaccacgatagcattagctgagtttctccaaagtaagtgcctccgactaaagcaaaacaaaaggtcattccaaactgaaaaactggctttaacaagttgatcgcgatcgtctgtgaagcaacttctaatggacgtttcttatagatcgcttttccagcaaaatagaaaacgactgaagtgataaaatagataaatagcataatagaattaacgggtaaaaaaccaccttgagcttgatctgggtaaaactgaaagacttttacaataggggaatagttcccgatcgtatgatctaataatgctaagtcagataaaccggctataaagaagctaatatgaacagcgactagaacataaatccctgcaggaagcagcataaggatatacgttaacacagcttgaaccgctgatattcctgttaatgtgccggcaaaaacacacatcataaatgttagaatgcttacaataatcatcatcaatgtccaataaccaagctggttgattgaataaaacgttgacacgtcagcaaacaaatagaacatgaaaagaataagactattcactagaatagggacgataagcaaaattaaacctgacaagacgtgatggcgaaaaagatgctctctactaatgggtaagctatgaataaaatctgaagcccctttaacatgaatgtatcgaaagagaaacacagccattaaaaccggcattagaaataaaaatataaattgcaattcaaacataaatgttgaatcaaagagaccagcgccgcttgcatctatcctataatcatcgttaaaggccataagcaattggagcggcaaggtaaagacaaggctacaaaaaaacaaaatactaatccaaccaacatgacgaaaatctcttttgaacatttctcttctaaacaaggatgttttcgatggcatagcctaccccctccatttcatagatgaatatttcttctaatgtgagcggtaatcgatccattaagacaggaccaaatttctcaatatcattcatcactttccgctcatctccttttacaatcaagagtaggacactccctcttttttccttatacagaatttcaagatcactagctgctaaaagtctttttcccgaatctttaaacgcaacttgaactttatgtacaccttcttttaattcatctaaatcacgttcaagtagtatttcaccttgatgaagtattccaacatgatcacaaatttcctcaacttctcttaaattatgtgaagataataagaccgacatctctctttcagccacatcctgaatgatcaagcttcttactttctttctcacaacagcatctaggccatcaaatggttcatctaaaataagaacatccggtttaacagatagcgataagataaagatcacttgtctctggagtccttttgaaaaatgacttactttctttttttcgtcaatatgaaataaattcgttaggtttttgtagcgttcttcatcccaattttcgtaaaaacttgcgtaataattggccaattgcctcatcgtatattggggaagaaaatagaggatatcaggaataaaaaccatccgttgttttattggaacatctacttgctcgttaaggacggagatccctccggtgtcctgtctcaaaataccagcaatcattcgcataatagttgtttttcctgctccattcgatccgagtaaaccatagattgatcctgccttaaccgaaaagctaacgtcacggatgatgttattatttccaaaagctttttcaattccgctcacttcaatcattttttcgtctcccctctatttccgagattagcatctcaatctcttctacagtcattccaaggtagaacgcttcggaaagtaatttcttcaattggtctttcactttcttcaattcctcctcattctcaagtttttttgaaggatgaacaaagctccccttccctttcactgaatagatatagccttgtgactcaagttctctataagctttctgaatcgtatttggattaatttccaactgataagccagttcccttacagaaggaagtttctcatcatcttttagtaaatctttaataattaattgcttcagccgatcaactaattgttcataaatcggcttacgacttctaaagtccaattcaaacatttattcacctccgtaaaacgtgaaattcactaagtgtattaactgtattagtatatgtagtacagttaaactttagcaaacattttacttcttgagaagactttcttgaaaaaatttctaattataaacaaaaaataaaacaggacgcttttttttagcatcctgtttttcctttctgatcattttcttattacatttttttaattaaaattggcaagatattacttagctaatgttccctggtgaaagaacagttgccattgatcgccattttttctccatatcgaacttcgaagcgttttttgatttcttgttttatcatgaacgtgatacgtagcaagcatcacaccttctgctaaaggatgaatgttaaaatcagataacgtcatttctcttagcgaaaggcctccttttaccgcatcctttttactccaaatcgtcccggaacttccaaactcaaaaaaatcagctgctagtattgaatttaacttcattgagttctcccttacttgaggcgttagtaactccttttccagttgaattatctgtgttttgatttcatcaattctcatatttaaacctcctgttttttcccattacctccattttgctccttcaaaaaaccactagtagtagtaattttaacgaaattattgatgtaagcggttaagtacaagggtatgcattgaaattcactcaaggataatttaacctattagagtaggtataaaagataactggatgatggacactttaaaagaaaaacacaataagttacgtcccatttttcttctgtcgcttgattaatgccgtttacatataatcaggcttttgaataccttaacatggttttgccttacgatagaacaaactagcgtaattgcttaaaagaaggagaagtgactatgtcagaatcaatcacaaccgaaacaggcgaaaaacgcgttcctactcaagacgagcgcgaactgcttgatcagcttttagatcctaaagttcaggagtcactaagcgtacttgtaaaggaactacctaaagtaacagaacttgtaaatatgatgtctaaatcatatgataccgtacaagccctcgcgacagatgatgtattaaaaaatgatactgtagaattcatgtctgaaattcttcaccctgtcaaaaattctgtaaaagacgttgctgctaatgctattgaagcaaaggatgaagcagaaaaaagctctgaagttattggccttttcggacttttgaaaatgctcaaagatccacaagctcaaaaacttttcagatttgtaaatgcctatcttaaagtttcaggtgaaaaaagcaaccaaaaataatactgatctgctagaaatggaggaacaatcatgtcaaaacaaatagtcattttgggcgcaggttatggtgggcttctttctgctttatccgtacgtcaatacttaaacgaatccgaagcaactgttacattaatcaacaaaacaccaacacaccaaatcattactgaattgcaccgtctagctgctggtaacatctctacagaggctgcggcacttccactcgacaagttattaaaaggaaatgacattaaccttaaagttgcaacggttgattctttttctgttgataacaaagaagtgaagctttcagatggctctacactttcttacgatgcactagtcgttgcacttggtagtaaaacagcttacttcggcattccaggacttgaagaaaacagcatggttttaaagtctgctgaagatgcaaaccgcatccacgctcatgtggaagaacgaattaagagctttgcagcgtcaggtgacgaagcggacgctactatccttattggcggtggcggtcttacaggaactgagctcgtaggcgaactagctgatgaaacaccgaagcttgctcgtaagtacggcgtagatccagctaaaatcaaattaaagcttgttgaagcgatgcctaagattcttccaatgcttccggacgaattgattaatcgtgcaatgactagtcttgaaaagcgcggcgttgaattcctaacaaaccttcctgttacaaatgtagaaggtaacgttgttgaactaaaagacggtcaaaagatcgtaacaaacacattcgtttggacaggtggcgttcaaggtaacccgctcgttggcgaatgcggtattgaagtaaatcgcggccgtgcaacggtgaacaattacctgcaatccacttcacacgaaaatgtgttcgtggctggcgatagtgctgtttacttcaaaccaggagatgagcgtcctcaaccacctacagctcaaatcgcatggcagatgggtgacctaatcgggtataacttatatgcttacctttatgacaaagactacaaagaatttgaacccgttaactcaggtacattagcaagtcttggtcgtaaggatgcagttgctcaaatcggcggtaactcaacctctcttaaaggacttcctgcatctgtgatgaaagaagcaagtaacgttcgttacctttcacacattaaaggtttgtttgccttagcatactaagtcaagctccactttctataaagatataaaaagaagtgctgggaattgccccagcactttttttatacaatgaaatccggcttttttccttttacaatttgatataaaggatataaatcacctgaaacaccgtggcaacatacgaaattcattccttctataaacattcgactcgtaaacacagtttcgccattatcacaaaagatttcaatacttgaggaatctacaaaaagacgaatttgatgtgtttcacgagtacttaataacaatggccctgtttaagaaacaacgcgacgaaaagtagggttatgaagttatcctattccacgttcacctttaccatccgatcatcttctttaacgggatctcctcgaccatctttattattcgtgatcgcatataagttctcctcatctaaaaataatgaacgaactcgtccaattccttctttcacaactgttgtcccctgtcctttaagctgaaacgacctaattgcctcacctcgtaagcaagcgacatacagctgatcattccaataaaccattcctgacggagcccatgtgtcgttaccagaatgataaagaggctgcgtcatgccatcagcaacttcatcaccttcaatcacaggccagccgtaattatttcctgcatcaatttgattgatttcatcatgtgcagactgcccatgctcagagctaaaaagctggccttcatcattccaagcaagcccctggggatttcggtgtccatacgagtaaacataggaaccattaaatgggttgtcttctggaacgtttccctctacatccatgcgaaggattttacccgctaaactttccttattttgagctagctctggttcaccagcatctccagttgtaatataaagcatgccatcaggtcctaatttcactctgccaccattatgaaactgtgaaccaggaatgtttgaaagaagttcgtccgtttctgtccataccccttctttcaactcaacctttacgaccctattcagcgttttactatcttctagataagtgtgatagaggaaagctgtttgcgattctggaaaatcttctgatagtgccagacctaaaagcccaccctctccttcgctgtgaatcgcttttgaaagttgcagagactgccgttccaaacgattcgaaacgtttgccatcatgccagaacgttcagttagataaaaggttccttcagatcgggtgacttcccacggaacatccaaattttctatatatgagtcctcagcatgattctcctctgcaaaatgctcattcgaacgatcgttaggttcattactagagcatgctaccaagatgagaaatgcaccgatcactaccattattctcacgatgtattcctcttttctcattatttttaaatcactcacaaatcattaatacatttccgtcagggtctttaaagttaaaccaatgcccgttttcaatctccgtcacaagttcaatccctttttctttcataaaagtaaaagcagcctcaatgtcttttgtatcaaaatgaaacgcaggtgtttggaatatagtttcctctgaataaattttactatcaagaacaagtccagtcccattcataggcacaatataaaggtgtccagcgataatatccccatctgcctcgagaccaagcaaatcacagtaccattcctttgcatcctcgatgtttttgactgggataaagaccgcaccaacttgatttaagatcggggtcaattggctaaccttcctttcaacatatatttctcctcaattatatctcttctcgattccttgtgttgatcctgctcaggattaataaatcgaaaaaggaagtacttacttataaaaaacacttttgcttcctatgttacaataaatttaacaaaattacccatctgcatttatgtttctaaagagtagctgatggtggcgtggatgaggaaatggttctcaaacaaaaagagcctatctatgttcagataggctcctcttcatggtaaaggaaaaaatctttaatcttaggtataaacactggcacacgtgccagcttcaggttcataatagcaatgatttttaaattgacctgcaaaaggttgcccataccaggtaggaggacaaggcgcatatggattgaaataccaaagagcatatttccctggatgttgtctccaataatccaagttcttttttgctaagcgtttttcaaccgaccttgctctgttataaaagacattccctttttgaacggcctcaaaagaataattccctccctgcacttgataaataactcgaggaatggttcttatatctacaaagtctaaacattctgcttgggcacggttcacaatgacatttcctacatacaacattcctagcttcccttcaccttcagcttctgctctcatcattctagccattaaatcaacgtccgaatttgtgtatttaactctcggcatatttttcaccccaaatacattgtatgaaggaaatggacttttatgacattctttttataatccacgaatcatcgagacacttctactaattttttatattagtatagaattggtagaagaacgaattgctaaacgttcataaacctatccaaccaggctaggactgtggaacagattgatctttctgtttattcccgtttttctgtagcacttttaatccactaccgatgtctgatgctagatcgttgttacgcatgtcttttctttctaccgagctttacagatacatttacagtctctcttagctcaccagtagtagaaaactccgataatgactctttgacctctttttcaaactcctcaattttattgcccaaaaaccgtcttgccccataggaagtggagtataagtttcctagaattgactcaatcgtccaattgatctcatacgtaggtaaagtatgtacttccacttcaaattttgaatttgatataacttcttcgtggctaataattggatgagtataggtggatttacctgctctccgttctttcccataccatttttctatgagttcattcagttttacttgccaaggttctagcgatttatctggatcataattatctatgatagccactccaccaccgtagggaattaagtcgaataactcctctaaaaccctgggtctgtccatccaatgaaaagcctttgctattgtcacaatagtgaattggtcattatgtaattctttatattgttctagtgttccattaaaccactgaatttgccccaccctcaactcttggtgaagacgttttgcctcattaatcatttctggttctatatctatacctactattttattacaccaatccgagaaccttactgtaagttgacctgtaccactacctagatcaaggaggttttgatctccattaagcgaaaactgcttcactaaaaaccttattagagatgctggatacattggtctgtatcttgaataaaaacgtgctgcatccttaaacaaatctcctccatacttttccaattaattccccacccgtatgaatcttttattcattcactatttgttttcgctcctattgttcgagaattgctctgattatttggaataaatcagtaaaaaaaagataacttctttctttttcgaagaagtatcgcaactactactagaatgattggaactaatgaaattaatgcaatgctcatccccctatcaataccgcactattccgcactatacctgtatagagcgcttacctattattcagcatgggctcgatattctagaaaacttgatttcaggatactataatcctgtgataattaggtattatgtgtttcccttaatcttaacccattagcaacaacaccaattgaccctgaaataataaatacataggcaataaacaaaggcgttgaagatagcgtttcagtaaataatctatacaaaccaaccgaaaaaataagaaagctacctattaatgcaacaactatcctattcgccatctttaagcctcctaaataagtcattttccctttcaaaaagttaatgcaatgaagattctatttagcaattacgtgtgaaggttccaagtcattgaactacaaatatctcaaatggtctacctttaattttttatataaatctttttaaatattcgccaaatatcttgttcataactttgggtgtgttttctaaataaacattaatttgttctatgtttgattcgaatttattagagtttctatcatctgttggaaaatcagatattcctttaataataatacattcaacatcattctttttacagatataagcaattgcacccgcttctgtatcggctattgttattttgttttctttaagttctaaaaagtccttccacataactactgctttatcagcagttccaattgttccggtataaaaatcttctccatattttgatagatcaatatcaactatgaaggattgtttagtaagtggctcgatttcttttactgtgcaatcatattgaacggctttatcgggtacaagaatatccaaattactgaacttatcatctattcctgcacatgttccagcaacgactactttagttaaattaaatttagaaatcatatactgattaccaccaacaccatttacttttcttacaccggtactataaaaaacaagtttggtatcattaattgttcttatgaaatactcgccataaggataaccgaaacgttcattttctttaatgccgaaatactctaatgtcgcttcatattcccacttcgttgctatacttattcctatcatcgacttatcaccctacaaatataatttgtcactattaagcaaacgctccgacttaattgaataagcctttctctacgattgctatccttttgatttctcctactttaaattcagtaattttttttctattttcattagtaaaaccttgaaaatacttgtgtatttcccaagctaacatcatagttatatggtctatataaagatagttaaagtctttcatataatcttcttctataatattaagctgcttttccttcaaaagtttccaatatgccttaattacgaaatgaattaactctatgtcataaatatcctgcaacaggatcgttatatctctcagtggtgaaccgattgctgcccattcccaatcgataaaccaaatctgctcttcataatggaatatattttctaaatgaggatctccgtgagtcaagaccaaagggcttctcgcttcaaaattacttaaagacaattggtcataaacatcatttattgtttggatccactcagactttgcccagtggtggcgatcacacaactttttcatttcatctagacaccaattgcgccattcagagcttatttggtgaataggtaactcgggggtaaggttcgaacttgtactgtgaaggtctgataacctctgtaagatacctgtgattaccttctgcctatctgttaaaaataaactgtcatacttgtcttttagtggtgacataggatcatgcataaggatcgcctagggaggtttattccagtcttgtactaatttgcaaaactgcttaatagggtttattagtttctcatagatatctatttcactatttcgatcagctgcaatgcttatagatatatgatcctctttgattcttatcatctaaaacatcaaccctaaatatactacctgcatgagcaccatgaataacttctttacttaatagcttccatcttttctctatcattctttcttctaaatgcgtcaaaggatcctctcctttattgttgtgcttgaaataggtgatgaagaattcaaatgagaaactatgacttataagaaatcgtctcaaccatttctctaatggcatttatgacaggtttcggtctgtcgatgtggatggcgtgcccagcctctttaaccacaatatgtttacttgttttagttagatacgaaaggtcaatttgaaacctcatccaggtgtcaaaggattcactcgtatggtggggttgcgttcctcctgtaagaacgataagaggaatgtttttgagtttacttccacgaacttgttctagactttcttcaaattcatttagcgaagattctacaaagaattgccctaagtattcattctttactttctcagtaaacagaggtaccatttcaatattttgatcttcgtgaactgaatctattaggattagtcctgttacatcttcagggtacctactagcataatgtcgtacatttactccaccaaatgaatgtcctactaataggtatggaggcttgatacctgcagctctaagtaggtttcttagattctcgacaatttgtaaactatgtttgggtttttgactattattactttcccctataccttctctgtcataaaaaaacacgtttgcaaaagtcgatacttcttttctaatggattgccaattgtctaatgcccacccataacctgattcaaaaacaaccgttgggctagagtcagacatagcaacatactcgtagtaaagcgctgttccttcgacatttatcttttgaccattactcaaatttctctcccccaaataaagaaccttttcttgatcaagttaatttcaatgacatacaaaacaatcgctccgaaatcatggaacattgatatgtgttatagctgtttccaactattgatttgtatccttagaacagaagctattaccccagagagacaaaatatgattcctactggcaaaatgaagaatagtaaaacattcgggattattccaaggtactgtagaattgtacataccggaactgcaacggtcagggttattaagataatcaattctagttttttggtttgcaaatacaaattctcctaaagcaatacaatagttttattagcatctaatcttagttatcatttgcttaataccaattatttcaaaacagtgccaataaatctatcttttttccacaaaaaagagcctatcttattacagataagctccgagttacttgaataacttataccagtacaaagtggtttcaatattaggattaaatgactgctttagtgtgtcaactccacctagtatgaatccttgtttcacataaaatctgcatgcaccaagattatcatcttgtgcttccaaggacattcctataagttttctttgttttgcccactcttccgctttatttaagagcaactttccgactccactacctctataaatttttttagtagcaatgttttcaatataacagaagcgattccaatccttaattattctaatttgtcctatgcaagtattattcatataagctaaaaacaaagttttatcctctcggtttatatattggctccaatcaagtttgtcatctggaaaacgtgtttctctagtttcatcaaaaagaacctctttataagaccactttcctgattgtaaactggggacaactctaccatataacttaaaataatcatttgtcttattgatatcatttattaactcattatttaagggagaaataattattttactttcactacccaatattacacacttccttttatgatttttttgaaaatattttatttaaggatagttaaaccctatcttattcaatattactgcccaaatttctaataccaattatttcaaattaattcgtgtaactcaatctttaactccagttaaaaggagcctatcttattacagataaactccgattatcttgaataacatctgaggcacctaaaactattcaccaactacttttttttagttctacttccaaataagatcttcgtattgatctatttcttgagcaattaaatatatgtattatatccattactgtataagacgctgattatcttttgtttagttaccaatctaaaagcttcattgacctcttcatcaaaatatttgataactttcacctatattttttgcccttcaccatatttctttggattggcaactcgtatagtttgtgaatctggcttgttttcaaattcatatgactctgtagaggatactgcatcgctaactgttttccatgattcgatttcaatatccccattttctttgttgatttctgttattttcccttgaataaatgttccttcttcaatctgcagacaacctatcatagtaatagctaaagctgcaacaagcaacaatgaagaacatcttgctcttcggcatttggtaacgagtggtgacagacacagtcatatgaatcacgcttcggcccggttatattgctgtgggcaatttggtttttggttctttgattcctgcacgatgattacagagctgatcaccatgatcatcccgatatattgccacgtcgataaggtttcgttgaaaatgaagaacccgatgacagaggcgacgactggctcaatggttgctataatcgaggcgcggcttgattccacatattgaagacctttcgtgtagaaaatgaatggaagcatcgtagaaagaaagccaagtccgattacgagtcctatcacttttagatcggtcaaagaagaaactctcaaatctaatccactgaaaggcacaattgcgaatgaagcgaaaagaaacgtgtacaccgtaacggttaatgagtcatatttcgaaagtgctgcttttccgaatatgctgtaaagggcatagaaaaatcctgatcctagtccaacgattaatccataaagcgaaatggacgtggtggagccagaaaagattccaattacgagggaacaccctatcaacgtaatcattagggcagtgaccttgcgagcggtcagtgattctttgaagataattcgagatagaatcgtaacaaacgccggggctgtataaagcaagatgaatgcaatcgaaatagaagactctttcatagaactgaacaaacaccaattgaaaagaacaatactaataataccggtacctatgaaatacccggagtccctcacctttattttgaacagatgacgattctttataaaaacataagggaccatgaagatggaagccgttaacacacgcattgctacgacttcaagcggcgtaaatcctatctcataaaggtacgttacgaaaatccctattactccccatagtgaagctccgattgcaatcagtagccatgctgatttactttccatcaacatccctcctatctataatccatttatactaacataggactggttccacaacaaaactatatctggattcaacaacttcaatcctaactgaggcctatactctggtcattgaaggtttggtggaggacggaaagacaagtacaccgttcccacaatgatttaataaaccattgtgctcggaaaagttctattgcaaacagaatcaaagtgactggcatgtgttttagtaatactcaataacgttatccattttaaacgtattgacgggacaaggaacctttccctctcttttttcgcttatgatatttccataaactcccccttcacaaattcaaaagcgcatatctcgaactcaagtctttaacaatcctgcactaaacctacatagagcgcttactttttattaagtaaactctccgagattgttgaataagaaattcccttcgaatccttcgaatcgagacggattggcatattaggttttcgcgtgaatctgcttccctacttcttcgaattactttcacactgcttgtctgtttcaatttccatttcagtaatttatatttcagtaaaggctctttataaaacctcgcttacttatttgttaccgagttgttctgccaaaccgattagaagtccttcgattccacgaatgtagcagagccgatacgagtcctcgtattgaaccatttcaccaacgagctgagcaccatacttagttagtctggataccatttcatcaatgtcttcaacggtgaacattacgcgttgataaccgagggcgtttacaggagcaatccggtgatctgatatagtaggtggggtgagaaatcgcgaaagttcaagtcggctttgaaaatctggggtaaccatcatagcaatctctacgcactgagaacccaatcctgttacgcgaccagcccattcaccttcgacagtggctcgcccttcgaggttgaagccaatctcctcgaagaatgagattgcgtcatcaagggattctacaacgatgccgacattgtccatttttattaatttgctttttgccatagttagatcactccttcttaattttgatcaaagctatcgactagtagcaccggactcaggtgaatttatattaagttataacgttcttggtcttccagataagctccgataataaggaagactcaagagagagaggtttcttcatttaatgcacctttttcatttcataaactaaaagaaaaaattagtttatgaaatgtgtagataataaaaatagccagggactcactaagagtagaacgcttagatacataaagttacgtttcccaagccccattgcgattgcccaactaaacaaactacatagagatgtcaggaggagggttgtaatcattccatactcctggaataaaggtattgtgaaagacaaaaaaccaacggcaagaataatccaatacatcacataagttagctttcttgtttccattcgcatcctctcctttttaagaattcatatggtatactaacgtaacacttttattttcccgctgtctttaacagtttatggcttatgactagtgaagcaggaatgcaaaagatcacgaatatgagtaaaccgatcgcatacgtagctactaaactgtaagaacttactcccatttgttttttccttgtcctaatgaataccctactcactaaactctttgtgttcatcaatgtagagagccacataaccacaattaggacaaacggctgcttttggtttggcagatactttattaaaaagtcccttcccttttttacttattctaattccataagtatcagcttcacattgatatagataacatttcatctttataccacctttgtttttaaattgctttttaataccacccagtaagttccaaaaaagcagaaacttaataagtgaatacacctgcaatatgaaacaaggagcttatcttattacagataagctccgagatacaggaatactcgaaatcgagatatgttgtgcagaaaggtaactaacgtaattttagtcgaataactcttcaactttgtaagctttagaccaatggtaaggctgaacttcttctagtgttttaaaaagtaatggtttgttgaagcatttatgacctctggagcaacactcgttaatatttcaccctcgttagtgtacattgctgctgtcccaccccagccagttgggtatctttttacaagcagttcttttgcagtttgatataacttttgttcaatatccaatttttcccttatggctactactttttccaagcataattttaacaccttcagccgttcttaacttaagtctcccatgagtaaaagagcaatcatctttattaaagaatagctccgagattatggaacaacatcttatagctactttctaaatgggtgtctcggaaaattctctaattacttccatagtgaaaccccaagtaataataattgctggagataaatttactatgaaagcgaatattctttttcctaatttatctttactaaatattgaaacaatactcagcggaataccaaacaaagacaaaagaaaagtaagcaacacatagaaccttaaaatatcatcgatcgtattggcactctcttccgaagttattccaatgtaaatgaatactatcatccctgtaacagtaacccatccaataaagtaggaaattctcgtaagtaagttaagactattcctatccattacttccccctctacaaatgaaaatataggagaacataattatataataatcgctgccattcgtataatggaagatacacttaaacaggattatcaaaaacgttatttcagatttgctccaagattatgtaagacttggattcgagatatttcttactgttcttttacttttacacccgttagtaaaaaacatatattactatttttaattctctaatgcgcttttcaccatacggaatacaaagtaactcaccccactaagtcctgcaattccgaacagggtaaagaaaacgttttgctcaacgtaaaacatacttacagcaaataaaatcaaacaaaatattacacctacaatattttgtatagtgttcatcttgctattgatttgttaccaccccctgtaacacaaaactgctcggtaagacatcaggtgcattatctaccataatatgtaaaacccaagttgatacgaagtaaagaacgaatttgtttgaagtgtatcatacatcctttacctttaactacaccccctaagtttgaagtaaagcccgcctcaagatggacgattattccggtatattactatataattaagttaattgttttaaaagatataggagggactgaagaaatgaatcaaacattaaataagatatgggatttagactctctttataatggtgggagtcactctccaaaattaaaggagtttatcacagaacttaaccattccattgataagatcatcaatgatatacataactttaaactgtacacaaatctgagtacagagcaattattgaatttatttaaagaaatccagtatgtaatgagtggctctttccaagtagaagaattcttaatttgcttacgtgccacaaatacaaatgatgaacatgtaaccaaaatgatttcagagagtgccaaaaccaaatcatcagttgaaaaacttgaggttgaattcaatcaattactaacttctctgtcagaacagacctggtccaaattattagaaaacaccgaagtgaaaaattatcaatttcatttagaagaaagaaaacaaaaggtagaagataaactccctcttgaattggaaaaaataattcaaaacctatctgttaacggattttctgcgtggggaaatcactatcagcaattgatatctaaactaaagatccctgttgaaatagatgggaagactaagcaacttacaattggtcaagcgtttagtgaggttttgttttcacaagataaagaacgaagaagaacaatcattctatcatataatcaagtttgtgaaactcaagcagatatatttgcttctatcataaatcacattatcggctttagattggatgtttataaccagcgcgggtgggacaatgtattaaaagaatctcttgagcaaaaccgtattagtgaggtaacagttaacaccatggtagctgtcattaaagaaaatcaaaatatactgcgccatttcttgaaaagaaaagcacaactggccaaaaaagataaactagcatggtatgacattccgattagtacttttaattcagagcaaaaactctcttataaagaagctagagatatcattattcatcagttttattctttcagtgaaaatttaggtgcttttgcagagaaagcctttcaagaaggttgggtggaagctgaagatcgcacagaaaaaatggatggagcattttgtgcatcaatgccactcgctaaagagagtcgtgtatttttatcctttagaggtcattaccaagatgttgtaaccattgctcatgaacttggtcacgcctaccataataacattttgcatgagatgccctattttgctcaacaaaaaggaacaagtgttgctgagacagcatctactttttcagaaaacttggtattagatgcagcaataagcaaagcatctactgacaaagaaaaactttctctattagaaatgaaaatcgtagctggtttaacatatttagggttagttccttcaatgtatgaatttgaaaaagaattatacaagaaaaggcaagacggtatggtaagtagccaagaaatatcagatatcatgtataaaatcgaatccaacttatatggtgacactttaggagaatttgatcgatatcgatggatgacgctctctcagttttatagtacagaaaaaccattcttcaacatcccatatacaatcggatacttatttagtaacggcatatatgccttatccaaagagcgaggagatggtttcaataaacaatacgatgccttgttacgtgatacgggaagaatgacagtagagcaactagcagatacctacctcaaaaaagacgtaacagaaaagagcttttgggagacctcaattaaacctatttcagacgcaatagaagagtatattgaacttacaaatagtatgatttaaaaagtgccagacctcatcaaattggggtctggcactaatatatataattgttataaaaagttatacttattcaaaattagcgccctatagctgaaaactaaatttcgagttaatttcactaatattttgttcaactaaagctccgagatagttgaacaagctattttaatctttatcaaaatcatcatctaaaaatgatttttatcttttttaatatcatacttcccctcaatatatcgaccaattattgagctgttaattcctctcctaactgccgtttctataacgatacacagaataaataaacctattaaatataaaaaaatagatagaccgatgccttccattaaaaattacccccagatataatttatcataattcctttcattactatattgaatgttcctgccacacaaagtaaaggctgtatctcttgttccaaataagctccgagataatggaagatctagtaatttgaattaaaatatataatctctgggtctccctcatctaaattctctatatttccactttgaataaatccgttcgcttcaaatactttctgcatcctaacgttagaacaattagtagaagagaatacttttgcagtaggagaattattgatcatatattccatcagcaaacttgcatatcccttccgtctttttgagggagatacaataatcagggatataaatgaacattcgaagaaattagtatcataagttaaaaaccccgctatattatttgtttcctgaactactatacagcatcccatctcaatggcattcctaatgaaatttcgtctgcttgtgtttccaattacttcactgtcaacgtgtactatcttatctaagtctgtaatattagctttgacaacgttatacattttacttctccttttatagagtttagtttctcttattccgttttactgcaacagacttacataaagcgctttccctttattaaacaaatgctccgatttaatagaacaatggatattcttgagttgcccccgtttctggaagacagttattatgaataactatcttccttcttgctaaaaatttcataagcaaaatatccacataacatacctatcccaggtccccaagtaattgcagatagaaaggaaaaggggctaaatatgctgagaagtatagcaacagccaaaccaatcatcattccgaatggtattaagctatctaatatattttgagcacttcttgtttttttcttacctagagtccctttcttagacttatgtttcattcttagaattataaatactccaatcccacccactattgcaactggcatcacaatacgcgcaatttccaaagataaatccatattataaaccctcatttctttcgcttttaagttgattaattttcaacaaagttaattccgttaaactgctctactcatcaataccaattatttcaaaacagttttaataaatccatcttttatttcacaaaaagcagcctatcttattacagataagctccgatttaattgaacatctaaatgttgatttctatattccctactatatgtaattaaaatagtagagtgaaaataagttccatagaaagtgaacgattataccgggaacaatagacttagttaatctataaacaattccaaaaacgattcctaatatgaccccgaataacggatactctgagtgcatcattccgaatattatagacgaaaccaagagtgcgaaaatgaaataagaacgtctattcatccaaatagataatggtactctgaacattaactcttcaaacactggagctattatcagcataccaataagaagtgatactaattcgaaggtatctaaaaaaagtgtttgtgaataattactagtaagtaaattgaaggttgatgataaactgcgcttgaagatgactagattcgcaaaaaatatggtcagaaatgctgttaatggtttaccatataatttattgattaactgcgtaataaacttaatgtttattcctctatatacccaactttcacctggtttgaactctcttattaattcaccaaacccaagaaactagtttcccataattttctttcattctaaaatcctctccctccaccaaacctattaccaattatttcaaaacttgacaatttactcaatgcaaaaaagaacttatcttattacagacaagctccgagattgttgcagatgtgcttctacgtaatttgttacttaattaacccttgagtcaaccatcgatcgaaatacttttgataccccatatcagtggctgtcatggtatattgcttatccttcaccttaaaggtatgtgatcctgacagagcttcataagttgggtttgtttttacatcatcgaaaagtgtttcgaaagtaatcacatctactgaattggtagtttcgttttcagtggtttcaagaaaaataaaatcaacttctccatgctcactattatccttaaacatcaaaccagctttctttaatgacagatataattgatccgaaatgctctttggtattattttgaaataggtcttgagtcttataaattcgactgtctaatgaaaaagcttttaattgaatttctgcttatttgttgaagtactagacctcttatttctctctaaaaatgaggcttaattgattacagataagctcaaagatgacggaactataaagaaatgccttgaaaaagcgtaagggttataactgggggatcgtcgggaaaatgcagatttacaacgataaggaaattctaaattaaaaagcccaacttctctgcaaaacaaaatagataaagtgagcttttcagttaattcattatttttaattgaactaatataaaactgctaagttgatttttagctcagctattttttgaattcattaactggaagaagtattcaggtttatgagtcttatttaggttgtaccatgaatgtaatgtatctgttgtaaatacatctaattttttcagtacttccattgcaaattccagaggagctattcctgatgcagtaattaaattcgcatcagatacggcagatcccaactcataaaacttttctcctttatagttaggacataccattttagtatattctaagttattacttgtatgctttctagtatctaagtatcccatattcgcgagtccctcagttgcaccacaaattgcagcaacaatagtgccaagctttaaagcttggccaattctttccaacataggttgatgaatttcttcactccaagtagtccctcctggtaaaattaaaagatctttactctcaagaatacattcatcaagggaaatatctggttttatgctcagtcctcccatagtagtaatcatttctttattaactcctactgtaataacttttaaaggtgctaaatcttttttgaaatatcttcctgagtttagttcagcaattaaatatccatattcccagtccgacattgtattaaatacatatagaaaaactttttttgtttgcatccaataacactcccaatcgcaatttatatagcaattataagataacttccctgacagttaccgtcagggaagttatcttacttgatgaaattttattaattccgacagaacttcaacaagtcttttcttaagacttattggctcaataactttaatagatttattgtacggtaaaagtaaataaggtacatatgtatgtatcatatctttttcaagaagaaaaactgcttgatttgaagtccgttcttgtaaataatgtcctaaaaaccaatgttggcaaatatcagccaagacacttttatcccccttaataaccaaagaaataatcccttccttatcttcaatagttggaagcagactttttataaaaaagtcacgtgctgaaaaattttctggccggttaaacttattttcggttagcattagactttcaattcgatctactctaaaactacggatatcattcctaagatgacaaaatccaatcacataccacttattattccaatagataattctgtacggatcgaccaatctatcatttgattgcttttcgccacttttatagtaaagaaattttactgagtacccttcagctacggcctgctccaactctttcaaaaaaggtttcatagagagtgaacttaatcgacttattacttcgagactagttaaatgttggtttatctttgtttcctgctcttgattagagtatttacttagttttgaaatggccctatttagtgcttcacctccataatatccggcttcttctgcaaaaacagcagcgtgatatagtgaagtttgctcctcaaaatcaaaaaaaagaggagcctcaataaaattgttcaataaagagtatccaccgttatgtcctggttctgaaattataggtacgccacttgttgaaattgtatcaatataacgatatacagttcttatattcatctctaacttttctgaaatttgttttgcagtaattttttcacctgaacgaagcatccatagaatcgctaacacattgtcaattttagacatataattccacctctatatgagatttatttcctattatatatttcctattctggtataactcatcaaccgtaaagaactgtttgtaaatacggtgaaacaaagttcacttttccttatggataacggattagcacaacttttgaataagacgcttgttcgcccaagcgttttttaatgcctcattagtgtgttaaatgataggtttttttgattgttcttcacattatctgatctaattatatattacatataagctccgatataaaggaagaaccgttagtaactcaaacaatttactttgtccattcgtactccatcttcaaaaacttgaaacgaccactatttgtgtcttgcataaaggttttaactgattcgaaacctgctctttcataaaccttaatagcccttttattaaaagtagcaaccgaaagcgttatttctttagggttatattttgaaattgcaaagtttattccagctttcaagaaaactaaacccatccctctaccagttagatcgggtttcatacctaagccaatctccgcggaatcttcctcaatttcatagcaaaagaagccgacttcttcattcccctttttaaccatgtaataaatatcgccacgaggactcatgagtttaactaaattctcttcatcattcttataatcataaaatgaatattctccttcatagtgccagtttaaaattttctctgcttgctcttgtgatatttcattaaacttgtaatccattacaaaccgtcctatcatatctctaatagttatctgattttccgcaaaacttcctattatgaatcaaatataacaatctcctgtagcgcttaactctcatcttcattaccaattatttcaaacaattgagaacaactcaatcttttctttcacattaaaaggagcctatcttgttacagataagctgccattaattgaagactcggtttcgagataacaatttaattatcctttctcaattctgttcacctatctttgattaactgctgaataactatgaacagctaataaatgcaaattatcaaaattcagtatagggtaattgaggttttatacaagttagatcttaagttctgacattcgttcacctttctcttatgacattgattggatggcaatctggaagactcctgaggaaagtgactagactccgattcaatcgacaatcccatccctaagaaaaaagttaaatctcgtcggtaagacgcgatccaacttaacaatgcaaattctttggtttgctaattaataattaacggcttcttcttgttggtgttttagatccttctcagtctttttaatgtctaacttcataagaatggagacgacaagcgctaagaatattaaagcaagaaaaacgtaaaatacaggagtgtaactatcggttctagcccgaatttgcgaaacaatcataggtccaaatacgccacctagggaccacgttgtcaacaaatacccatgaatggcaccgagttgtttcgttccaaacaaatcaccaataaatgcagggagattagagaatcctccgccgtaacaagtaacaacgaggaaaattagaagctggaatatgatgatgtttgatgtaatcggaagcatgaaaaaagcaacagtttgtattaagaaaaagatcagaaaaacattggggcggccaatatagtctgaagctgttgcccagccaagacgacctccaccattaaacacacccataattccgaccatcgtggcagctgcagcggctgataaccctacaacttcttgggccatcggtgaagcaactgaaatcatcataatccctgcggtagtattaataagcatcatcgtccaaagcagccaaaaacgctttgttttaaccgcttcttttgaagtcaattgttgtaaatcctttttataaactttattcccagtggccatattgtgtttcatagaagctggcatccagccttctgggggtggggcaatgtaagaagcacctattataataaaaacaaagtaagctgcccctaatatgtaaaatgtattagatattccaattgaagtcattaagttggctgcaaccggtgctgtaatgagagctcctgttccaaaaccaagtaccgctaatccggttgctaaacctcttcggtcagggaaccatttcacaagagttgatacgggtgaaatatagccaatgccaagtccaagtccacttgctaccccgtaggacaataggaaaagtggaagtgaatcaatcgcgatcgcaatccccgaacatgcttgtcctaatccaaacaaaacaccagccagaattgctgattttcttggaccatttttttcaacaaacttcccaaacaatgctgcggatgacccagccagtgccatcataatggtaaatgcaatcgttacttgagttggggtccaacccatttgttcacttacgggggtggtatatacgctatatgcataggcacctccgatggaaaggtggatggaaatagctgataaagcaattaaccatctgtttttcattgctttcatattatgtacctccttcactctctttgtaagcggatacaggaaacaggatactataagtggcgaaaaaaatcaaactatttgaaattatttgaaataaccacagaatcatgtagtggtattgtaattaaaatttaaaaaaatatcagttcagtgaactgatatttttcttctattccttcttgaacattccctttatagtaactcaatatacaaatctatttctcgttcaatatttcagtctttaaatcaatgatctcgaagtttgctaagttcatagcaattttctccatcattcattgacaagtagcttattaaataattgctccgagattatggatactaatacccacatcttgcctcttcaactagtacagtcattttataataatttattatgttaatcccaaatgttcacggaaggtgtgaccttcatatttctttctgaaaatacctcttttttgcatttcaggaacaattaattcaacaaagtcttctaaactaccgggtaatgtaggaggcataagattaaatccgtcagccacaccagcttcaaaccagacttccatctgatccacaatttcgtcaggtgtacctatcagcgtgtgatgtccaccgcctgcattaagatatcctaataattctcttactgtaggttgtgtatcattaataatttctagtattgtttcataacggccaactggaccagtaaattcttctactgggggtaattgaggtacttctttatcaatttcccaattagaacagtcttgttgaataaagaaactcaaccgttttaaagctgtttcaagaggtaattgctcatctaatgctgcttttttggctaaagcttcttcatgagtatgacctacataggttactaagcctggaaatactttaatatgtctattgctgtcttcgctttgtttaacttgttcatatagttttttacgaaatttttttgcttgctttaagttccacgacactgagtagactgcatcggcatattttgcggctaatgcaatgccttgtttagatgcccctgcttgcattgaaactggtttgccttgcgggctttttggtgtagtggatgggccatacactttaaaataggtaccatcgtgattaaaagactgaatgtttgaaggatttatcaattttctttcttctcgatgatgtagaaactctttactgtcccatgaaagaaataacttattcattaaagcagcgaattcatctgccttctcatagcgtttgtcatgagaaggtagttcttccatactatgatttatcgcctctaaatcagtcattgacgtaacgagattccaaccaacacgtccttttgtaatatggtctaaacttaatagttgtcgtgaagctgtgaaaggattagaaaaggtacttgatattgttgaaactaatcccacatgatttgtcacttgagaaatagcagttaaattgacaactggatcaaaccaaaatgctggcatatcactagaatctttaccttgaaatgattgattatcagcaaagaatactgcgtcaaagtaacctttttctgctaactgtgataaggattggtaatacgaaatgtctccaatacgttcaacgcttgagtcaggcattaaccaagcagcttgatggtgtccacaaccatacagcaaaacacctaagtgtagttgtttttctttagttttcgtcatttgtttacacctcaaaatacatcattattaattgtcttgtatagtcctttttttgaagaattatctatggtaatttaagctattagttcattgtcaaaccgccatctactgtgaaattttgacctgtaataccgttcgcattttccgaagataaataagcgaccatattggctacgtcttgaggtgtggtcaccttcttcaatggcgttgattgagcaattaaatcgaatacttctggtgttgtaacagcactggcgtcagtcgtttttaataatccacctgaaactacattcgcttttataccatatagtcctaattcagaagcgatattacgcgtaaaacctattaatccagctttagctgttgtatattcgtggtagggtacaacaggattttgatataaattagtacctatacttataatacttccattttgtcgttcaataaattgaggtatgacgctttgaactacattaaatgctgcttttaaagtaccatctagttgtttttggtaatcatcccaagtgagtgctgtgaagtttttctgtttgtttggatcaaatttgaagtctactaatgcattgttgactacaacatctatttgaccaaaatattccgttgctttttttatcaatttatctacttcttcacgatttgttacatcagcttgaattgcaatagcattctcttcaccaatctcagaaacgatcttctcaacagcatctttgcttttatagtaattgataactacttgaaatccttgttgcgccaatgtctttacaatagttgctcctaaacctctactactacctgttactaatactgttctagtcatcataacaactcctatatttttaattttgatgaaacttaaataataaaatgatagataaaataaaaatacgcaacctccccataggaaagttgcgtaaaaacaaataactacatattaagaataaggcggcacaaccgctcattgagtatgtattagagtttacactttcctacgctagtttcagctagttcaggttcaaagggtttgaggtaatactcatctcagttaaataacacccctagtgcatatatttaagttatattcaatgttatagttttaagaaattcatgtcaagaaaatatggctagttaacgtattcctataactttgttattctaaaattaacaggttatatcttcattcataactaatctattagatctgcttcccatcggctgttcaggaatggtttcatattgcctaaccattacttttttcttaatctgattgatctcatgcattttttcacctatgttttgacagtactttccccaatcaccaagtcaagataacgctccaggactaaggtgcggatactcttccagccaggcaataatccagtctcgataagggattaattttcatgggggccttctaaaagtttttaacctcttcaaatgttatctggaagtatattcttttttcattaactagacccattaatcgaataacttagagtttctttcacttccaaataaccccttctctttattccagaaaataggtatatattaaagcaataaatgatttcccatcttccgttatcctgcccgatagctgaacatcactctgctttacacaataacatatttttctatttaatcgaactattctacctttcttatgacattgaatactttcttttcagcaaaaaagaagtccaattcgaaaggcctcttaagatccgcctgccaaattgaactacttcttttgtattattgttttgtaatcgctgcgtgaatgtcgtaatctgcagggtcgagttcggtttctttaccaatcgcaagccttgcaagttcaagtccaagatatggacctacggttaggccagaggctccgagaccatttgcagccagtaaattattcatctcaggtacataaccaaatacgggaaggaaacctggagtgaaagggcgaaaacctacttttgcttccaaaaaagtactttttgctaatccaggggcaacagcaagtgctttactaaatatttcttgaagaccgcctgccgttactcgcctgtccattccagcttcattttcgtgagttgcgccaatgacgactcgcccatcgtcaaagcttaataaatactggtcgtttggcggcatcacaactggccactcgcttgttgtttcacctggcacctcaaggtgaacaatttgagctttttgagaggtgacattgaactttagtcctaaaggagataagagttcttccgcccatgctccagcggtaacaatgactttatccgcttcgagtatctcgccttcaattgtaactcctgtgatctcactatctgatgactgaagtttcgcgtcaccatatttcagtgtagcaccatacatttgtgcagcgcgtagaagcgcttgtcgaagcgctgcgccatttactcgagcggcgccgctcacaaacacagactgatactcttccgctacgtgaggaaacaattttcttgtttcttcagctgataacttcttgatctcacctatttctggtgcatcttctctccgtttttttgctcgatcgatcattttatctaatttcgtttcatctgtgtggaggctaattgcgcctactttcttgtagcccgtttctgtctctccatcctccattaattgttcaattaaatttggatagtattttgctccacctttggcgagtcgataccataccttatttcggcgttgagagagccatggacatacgatccctgctgcggcttccgtagcctggccaggttcgtttcggtcgataattgtaacatctacccccatttttgctagatggtaggcagttgaggcaccaagaatacctgagcctataataatcattgaattcatcagtaacacctatttcgttaaattcatttctttttcattttacacacaatcataaagccgctcaagcagttaatagacgcgttgtcgagaaacaactttcttctatataaattgctctctatgctaaaatgacaccattacattatgaaggagtttcatcatgaaaaaaacattggatcatatgggaattgcagttagacgattagatgaaagtgttcagttttatactgaagtattagggggagaactattcgaccgctatcgcagtgaagctacaggagttgagagcgaaattgcagtgattgaccttaacggaagtcgtattgaattgcttatgcctacaaacaacacaacttctccaatcgcacgatttatgaaacaaaaaggaaaaggcgttcaccatattgcatacagggtcgagaaccttgatgaagcccttaaagaattagaacaacaaagcattcgtgtgatggaagaaacactgcgcatcaacaaacatggtagaaggttaatttatctaaatcccgctgatacagaagggacaattattgaatactgtgattatccagaaacagattaacttataactgtataaatgctagtcgaaaaacaagaatcataaatagcaagaatgtgagcacaagtagtatgttgagtcttgaaggtaagttattattttggttgtttttatcactcatggcagctttcctcccgttgctaaaattgtaaaacgatatcgttcgtgttattacttcatgatcgtcatgggtttcaattctcatatctttgacatataggaaaaaacagcgcctataccagaggacatattcctcatcgtttgcattttagcataatttcacttgttacaaacgagttttttggattcaaagtgattttttcttcaaacgatttaaggaaaaacaggtaattgaaagcttgcccctctcaattgcttcatcttcttttacatcattcgtttcaatttcttttcttatggatggagaaaacgtcattatctttagtcattcagacaaatcatttcatgaaaaaaatgcagcctaagctgcattttttcattccatctatattttcgacccctcattatgaatgcttctatacggtaatttccatccatatcgaagagaaagcatgcggagaaatacaatggttccaaacagtaacattaacggaggcagttctttcggataaccaaggccaattaacagaccagccatcatcgcccaaacggcatagacttctttttgcaacaccgttggtttccttctcgctagaagatcacgaatgatccctccacctgttcctgtcatagcagcagcgaccatagctgcaataaaaggatgtcccatctcttctgcaaagagtgcaccctggattgcgaatgctgcaagaccaatcgcatcaaagaagctcccccacttttcccagtaatagttaatccagctagctggaaaaacaaaaataacgagaattgtagcgatcgcaatcataataagaatgtcttgatcccaaattgaagctacgggaacacctattaataaattccggataatccctccaccaaatgccgttgcaagtccaagaacgattacaccaagaaaatcaaactcttcttcaagtgcgaccagtgcgccactcgctgcaaaggcaatcgtaccgataatattaagaatctcccaagtcacaccattacgccctttcacgatctattgaaagttaaagtgtacgtcagctttcgcgtgttagcaacccttaataagaaaaaacccccagctggaggtttaagaagaaagatgatagtgcattttgattaagtcttcatctgaatgtggaatttcctttccttttaccatttgagcgccgttgatacatccactcgtaaggagaataatatcgtgatcactaccaagatgcagtgactttaagacaccttcacgtcttgtatgtgtacgatagatattcggagcatttggattcgaaaatccagacatcaccttatcaactattactgacggctcatgatatcctggatggtccacagttacaatcacttcatctgccctaccttcgatcgccttagccattttaggcattttttcaaagtctcttattccaatgccagcaatcatgacgattagtttccgatggtctattttttttacttcatcaacgaggtgagtaagagcaactggtgtatgagcgtaatccagtataatcgtctcacgattcggcccacttatgacttgaaaacgaccttcgggactttctaattggggaagcactcctataatttcggataatgaataaccaagtaatagagcagtaccaacagccgaaagaacattcgcgacattatagtcagcaaaaaccggtacaaatacatcatacaactcaccatgtgaaacaagactaaaagaagttccgtttacttgatagcgaatgtcagtagctataaggtcagcctcaacatgttgatgtaagctatagcttatgattcgaccgttaaaggtttgggtaagttcactccccatttcatcatctacattcaccacagctgctttcgcttgatcaaagagcttcattttacaagctttataatgttcaaatgtatggtggtattccaaatgctccggagagatgttagtatgaatggctacatcaaaatcaacctcatctactcggtgttgatcaagggcaatcgaagaaacttccattgctactcccctatctcctgcctccactaaatcattgaaaatacgatgaagatcgagtgattcaggcgtagtaggcgtgctttttttgtacggaatcctctttttggaagaccagatacctgttgtgccaatcgaacccgttggtaacccaagcaagcttaaaagagaccgaacataagcggcaactgtcgtttttccatttgttcctgttacgccaaccgttcttaatttctcatctgcggcatcgtaatattgttttgaaaaggaagccatcgcttttcgaacatcatcgacaaggacaaatgtgcactctggataacggtgtgcaagactttgagtaagatcttctctgtcagcaatgacagcgactgctccattttgaatggcgtcttttatgtataaatgtccatcgtgattctcaccttttatcgcaaaaaacacggaagacggctctgcattctttgagtgaaacgtaagttggttaatcgtctgatggtctggcccataaatttgatgaatggatggatagtgaagttttgaaaagttaatcttcatggtgaattcctcgctttagctgtattatttacttttactggaaaatttttaaaacgaaagtaaataatctaattttacttaaattccccatatttatttgataataaaactatgccgttacatatagcatactcaatttatactacttttcattcataagaaatgaacagacagccttgaaaaacagctgtctgttattcctgttacttttctgtattatagtggttccggacaaggtcggataggctaagttcatctaggagatggacgggaactaaaaatgtaatcgtcacaacgcctggatgccttccgatttcaattgaacctgtaatcgttgcacggttcattacttcaggaaccgaaatgcctaacgtgtcagctgcacgcttcagtccattatctgttgcttcattaagatctgcaccggttcctataaaagataccggtagtgactcttccaattttgaaacaccgtacatattcgccacgcgcttggctgcttctctttcttttgaagtaaatggctttgccaaatgcggtagatcttctaatgtcgggagtaaaataggtccatctatcgttaggtccttaatgacgatcgcttgaagatttacaatacccgcaacatcagccgtatgacctgctatctcaccattcccctgcatggcatgcatgtccccgatataaatacctccacctggcactttaacaggacaaatcaatactgctccttctctaacacgattgatgtccatatggccgtctgtccgatcttccaattcctcttgtgtaacaccataatcatgaggtgcatcaattagaaattgaccgaaatctccggcattatgagaatcaggtaatgggcgggaaggcgttgttcctagctgtccgagaaatggacgtagtcttgccatcgttcctactaaatcacttggtccaaacgttacaattggattttggacagagttttcaggagtagccatgaaagatttaccattctgacctatatgagtggctgcagcttcatccaccgtaacaccaaccgttcgatcagaatcaaatgccattgtatacccattcgtaaagacaaaaggcgttacatcttctccacaattagaacagcgaatcgcctcaggtccggtacctttaattttcgtatcgggatataattctccacacccagggcatttcaccgctacgaatggatcaccaacaaaccttccatcaacaggttgatcgtttcctgaagaagttgccattgaagtaacctgaaccgatttaatgcgtattgcaattgcgtccccaacttcagcaccttctacaaaaacaggcttcgtcacttcatgcccaccgcgtagacaaggagtgatcattggcccccaacatccaggcgctgtatttgcaacaatatgccccccatctttcaatggtccaagcatttcattggaaggatcgagtattccgttcgtaaattcattaacaaacaccgtttgctttgcttccattgcctctccccttttcctatgtattccttccttcattataagagtaatgtcgattcatgtaaaaaattaattggctaaaaacaaaaaaactttgaattccaagctttgttactttcattaatgacttattttgaagtgattgacgaattgcaaaacgttgcctatactgaataaacgcaaacatagagacgggtgatgaaatggaatttaaaatgcagcatctttccttttacttaatccaagtagaaggaagcggggaaagtgaagaacgacgctataagcattatcaaacacttgatgcagacagctatgaagaaagctctctcaaagattttcttgatggcgaattaacgaaaattatgaaacgaaaagtggatcgtcatgctaaatctgaaggtgctccaaccaagattggccgatttattgtcgagcctggtcatgagctaacgtccaatccaaactataacttattcgatcgcacccgctatgccgaatctgcggatgattttgaaacatctaccgaccaaattgtacaaatgtatcttgatacaagtgcgattagaggtggggttttgattgttgcgacggctaaattaacaaaactcttcgatgatccttttctctttatcttaaaatgtgactttgaaccaaaagtggctaccatcactgatgaagatacgttaattcaaaatgttgaaatggcgattacgacaaaaagtatgaaatcggtccagtatccttacatgccagaagaaggcatgatcgatagtgccgaaatcaaagtccatcaatcgtctcacgcacgctacttcgaagacttcttaaaatgggtcgaatacgaaaagtcgatgcctgaaattgtgaagacgcaaacaatgggcatggtccaggagcatatccaagaaacctaccaggaagaaagcgaagaaaaggaagagtttgaacaggcaatggaggaatggtctcagagccctaagcgagagctacaagaacgctttacgaccgaacaagttgttgaagctacttcacagattgtcgagcactcccctgacgttgaatggaagctgaagcttgaccacgtatccgtgaaagcgatgctgtctgacttcggcgaatcgattcatcttgcgaaggtaaacgggaagtatgtgctagcgattgaagccgattcgattacgtttgagaaaggcttttctccagtcgagtttcataagcctgatacgcttcaagaagttgttgagcggatttataagaagaatgagaatgagtcataataaaaaattaaaaagctactcgtttcaatcatatatacattttaaaaacctcactactatgtggggttttttaaaaaaagatcgttttaagacaaggtagttcgatttttaatcgcttctgtaataggacgattcatgtataaatcaccattttgataacgagtccgacccttttgttttatcctctctttatccgggtaaaaaccactatcattagaataaggtggtatgacatttatgaaaccctttgaacaagcgttaaaacatcaagtaggattaggcacagcaccactaggtaatatgtttcgagaagtgccagaggatgaagctctgacgacgatacaaacagcatgggatcagggcattcgttattttgatactgcccctttttatggagcaggcttagcagagatgcgtcttggtaacgtgttgtcaaagtataatcgtgatgactacgtattgagtacgaaagttggccgttatgtaacggatgacacggaagacaagaaaggcttgttccaatatgctcgcaataataaagtgattactgattacacggaagatgcaacaaagaggtctattgaacaaagccttgaacgattgagaactgatcgcttagactttgttttcgttcacgacgtttccgcagattttcatggagatgagtggatcggaaagtttgaagaggctcgtaaaggagcctttcgagtgttgacacgacttcgagaagaaggcgttatcaaatcatgggggcttggtgttaatacaacagagccgatcgagatagcgatggacctcgaagaattccgacctgatatatgcttatcagcaacacaatacactttgcttcagcatgaccgagcgttacagcgtatgatgaagacagctgaagaaaaggatgtagcgattgtcgttggcgcaccgtataactctggtgttttactaggcggtaatcattacaattacgagaaagcagatggcgatattattgcgaaagttaatcagttaaaagaaataagcaatagatatgatgttccattaaaagcagctgctctacaattttcaacttctcaccctgctgtgaaatctgtgattccaggttcaacacgtccagatcggataaaagaagatattgaaatgatccaacgcgatattccgaaagctttctgggatgaattattacagaagggatttatctctcctaatgcccctttacccagtacgattaaataagtatcttaactaaacaaaaatggacttctctactggaagtccatttttgtgtatatactttgttgtaccctaaaaaattacttcctcattctctttcgtttatgccacttgaaatatactttattttcaggatgaatgttaatttttttgcgttgatttaatccgtacatttcatagtcgttttcttgaatacttgaagaaatgtgtaatcgaccctggccgtcaaaggcaatcaacccctcatcatatagagtagcgtgattttgacaaagtagcaccccgttaaaaggatccaatcgctcgtcatttgagcaatccttccacggtttagcgtggctggcttttagcaattcaggaagtttaatggcacaaagagcacactgatcttcccataatggagcaacttcattgcgaaactttaactttccccatctcattttcattttcgcttctgattctgtttccgtaatgactggtattaatgtattacgttccgttcttctaacttcatctactgttaactctaattgttcttcatttatacgataaaaattggactcactaattagctcaagcagcttaatagttagtgcttcatgacatgggtataaatagccgggatttccacttgcatcaagttgaaatggtgcgtatttaagaggtaataaaggtgaaatttcttcaaatttctctcttacatttagcggaacatccaactcatggtattctagcgtcactaaatatcctttatcggctactgtttgatgccataaagtagacggtctcgcctcctctttacagtcactctttgcaaggctaaccgctacaatctctcctttaacatagtggaaaataggatctccttttttgacttctttcagccttttccatgagtgaggctcgtggccacctttatcttctttaggtgaccagatcacccctgcttctttttcttcagcatatgtatctccttgcatgacaataaaactattcatctttcttcctccaacttttgagcttatttctctagttgttattttcacattgaaaaacgtaatcttttcatacgttatccaagttaaagtatattggtgatttgtgaatcattcaagttattcggtattttagatatatgattaaggataactactccataaaaaaagaccgagccggctcgatcttttgctaactttctataaaaaagcgacgttaattctctattgttgcattggtcggacaaccacttcattcacattcacataatcaggttgggtgactgcatacacaaccgcacgggcaatatcatccgcttgaagagctttcattgaagaggcacgatctttaaacatgttgaggacctcttcatccgtaatatgatgagttagttcagtttcaacagcaccaggagatatattagtgacgcgtacaccagactttgacaattccttttctagtcccatcgatagggcccttactgcatattttgtagcactatagacggcacttgaagcaaatacttcatgacctgctacgctcgatacgttaataatatgaccactctcttgttttaacatatcaggaagtgctgcatgaattccgtatagaacacctttaatattcacatccaccatttgactccattgatccacctcatcatttttcataaatgatagaagcatgacccctgcattatttacgactatgtcgacctttccaaattcttgtttagcttcctcaacgagtttctccatgtcttcttttttcgtaacatccgttttcactacaatggcttttccatttgattgattcgtgatgaagctcgctaagtcagtcagtttttcttcccgacgagcggcaagcacaagacttgctccttcgttcgctagttgtttcgctatcgcctcaccaattccactacttgctccagttactactgctacttttccatcaagtttcatcaattgatcgcctccgcttagttaaagttattcttattgaccatagcacaactttctaaaatatttgaatgttctgctcgattaatatgtaatcactaatagtgtaaaatgaatatgtatgattaacaggaaataggggggaaacaatgttaactaatcatcagatcgaaagcataagaaacctcatgctcatatgcgaagaacatgatcatatttcgctaaaattaaatttcgacctcctcgaacaacgaaagaatggtgaaataagagacttttttcattatgaaaatgattcgcttgtgggctttattggattgtatggttttggtaacacagtagaaatgtgcggcatggttcatccgcatttcagaagaaaaaagatatttacagcgctatattgtgaggcgaggaaactaataaaaggcttaccattttccaaaattctattaaatgtgcctgataaatcagcttctgggataggctttttagaaacactgccggccactctttcattttctgaatatcaaatgaaatggataccttgtgacctccccccctctaaagagcgatgtgactttgcgttttgctcaatcaaacgaccttgctttcattaatcacctaaacaaggtttgctttcaatcaacacatccattagatgagctttcccaaacgagcgtaaatcggacttacataattgaaaaagacggcgttccctctggtaaagtttctattgttcgcgaagaaaaacaaagctggatctgcgggcttgctattgaaccaagttatcaacaaaaagggctagggtctgaaacaatacggattatagtcagtagagagtactcggagggccaggagctataccttgaagtttccccaacaaataagcaggcaatgactatttattttaaaaacggcttccaaacgtttaacgcacaacactattttgagataaaaaaatgaatcacggtctctcccataagcagttttcttcctatacaaaaatgaaactaaccaacaaagtcgatgctttgttggttagtttagtattaaaaggtcataaaccgctaattgatataccgatattccatcaatcgatttaaaatatgaacttcctgcaagatctcttctccaatgtttgtttcacgaactttttttctttctaattccttatctactaatcgttttactgataatacatctgccccgtgtaataaaacttcttccttagaattaaatagtttatgagcaacaagctgcatgccgtaagaattaaataataacgtgtatccagcaatacctgttgttgattgataagctttcgagaagcctccatctatgacaatcatcttgccatttgctttaattggattttctccatcaatttcttttacaggcgtatgtccatttataatatgaccttgatctggattaagatcaaattctgctagaatctggcgacagatctcttcttcttcacgcaaatgataatagggattttttctttctttatggctctgcttatcattaataaaatatctctcaaatgtcgtcatttctctcttaccgaacagggaagaatattcgcctgtccataaataccaaaccatatctgtcgaaaggtcagctgtttcttcaggatgtgcgaaagcatggcgtaaataattctcaaaaacatcaagtaactcgcgaccggcatacgttttattttcgattatcattttttccatattgccattctcatcgagagggatacatccatgaattaacagattctcattgtattttagataaagactgccttttttcataaggaagttcatatgtctagcaagcttttctgagtgttgcactgaaaataaaagcttgttgattacttcctcttcctcctctaatagctggtcaggatgatttggattaatggttgaaaaacaggtgttttctaacaaatacgtttgcccatgaatcgtaatggtattttcttgataatcaattttttctaataaaagtctctcagacatattaaagtaagatcttctcttgatgattgggctctcgagtttaaactgtatcatcgtaatcgcctgatgtattttcgtgatttgacatttttcatgactcgtttgtttctcatcagattctctctttggcgcaaaagcgggattatcatcataatatttttctgcgagattcagtaagggtctaagatttattccataaacatcttcaataatttctaaattgttgtatctagcacagatgcgaataatgtttgcaagacatactttagatcctgcaaacgcaccaatccataggacatcgtggtttccccattgaatatctaccgaatgatattgaataagggtatccataattttgtcaggttctggtcctcgatcatagatatcccccacaacgtgaagatgatccacaactagtctttgcgttgtataggcaagcccggtgattagcttatcagcttggttcagagagataatttgttgaagtattttattataataaggctctttattcgtaagatcagccgttttatagagaagctcttcaatgacataaacaaactgagtaggtaaagctttacgtaatttagatcgtgtatatttggaagaggcatacgaaatgagctttagcatacgttcaatcatcaccgtataccattcgtataattcgttttcactactaaaagaatgtttaattaggttgattttttcttctggatagtaaacgagcgtcgcaaattcgttcaactcatcttctggtaattcatctttaaacaagtcagaaattttctctttcactttacctgaaccatttcgtagcacatgttgaaaggcttgatactccccatgtaaatcactaacaaaatgctcagttccttttggtagattaaggatggctttaaggttgatgatttcagtcacaactttttcttcactatcatatttttgggcaagtaaatccaaatgttttgagttcaaactgatgtatcccctttcaaattactgcaagatgtaagatgagaacgattgctactagccttactgggattcatattcatgaatgattctttacattgatagtaacatatttttaaaatactagaatagagaataaagcagtactctactaacccatcgtatgaaaatgaatgacttactgaactgcgaatttccatatgtaaaaggtacaaaaaagcagttccatttggagcgcacgataacaaggtgccccctccaatgaaactactcttaactttacttcttttattgaactgttttttcagctgcatcaacggtatgttttaatagcatcgcgattgtaactgggcccacgccgcccggaacaggtgtaatataggatgctttcttagcagcggcttcatattccacatccccaacgtttcctttgttgtatccagcatccagcacgacagctccatctttaacccagtcgcctttaataaattccggtttccccactgcagcaattacgatatctgcttgctgtacatgtgaagcaaggttagtggttctcgaatgacaagtcgttactgttgcattctgatttaataagagcgcagatactggttttcctagaattgggctgcggccgattacaacagcgtgctttccttcagcttgaatatcatagtcttccataattttcatgatcgcggcaggagtgcaagatggataagttccaaatccaagagcagtttggccatatccagcactcgttacaccatcaacatctttctcgatcgcgatagtttcaaaagcaagacgttcatcaatttgagatggaacaggatgttgaagcaatataccatgcacagaagcatcctggtttaactcttcaattgtctgtgcgagcgtttcagttgttgtgtcttcagagaggtgaatttttttagaggtaattcctacccgctcacacgcattgcctttcattcttacataggtctcagaagatggatcatctccaacaagtatagtaacaaggctaggcgtcacacctttttctttaagagatgcgactcttgtctttaactcttcctttatgcgattagcaactgctttaccgtctaaaatttttgtttcttttgtcatatgaactcctcctgaaaattggtaaagaatgagttgcctcatttcttcgcccagacgaccggcattgtacgtcacagctcccctgtggttacttccacatttgtcgccagttactgcaacgaatcttttctacggatatagtagcataaaacagaaacaaacgaaagaaaaaccggacaataaactactaaaagtgaacaaattaattaaaatatatttaatcgttcgtgtataacctcaccgacacatctaagaagcgatgaattactttcgattatatttgttcattcactcccaaatattctttaaaataaatgctcaattcgttttattggaaattacctccatgcgcaattactcatgtgtataagaacataaagaaacccttgaatagaaattctattcaagggttcttggtatgcgccttagaggattcgaacctctgacccacagcttagaaggctgttgctctatcctactgagctaaaggcgcatgatatggagaagtttactcatctaatcattagtatatcatgatttaaattatgatgggaagttcgttctgacattcttctctaaaatatgtaatggagcgggtgatggggatcgaacccacgacatcagcttggaaggctgaggttttaccactaaactacacccgcaaatggctgggctagctggattcgaaccagcgcatgacggaatcaaaatccgttgccttaccgcttggctatagcccaatcatggtggagggggacggattcgaaccgccgaaccctgagggagcggatttacagtccgccgcgtttagccacttcgctacccctccatgatgaaattgaaatatggtagcggcggaggggatcgaacccccgacctcacgggtatgaaccgtacgctctagccagctgagctacaccgccacttaaattatgtatggtgcgcccgagagaagtcgaatccctaaccttctgatccgtagtcagacgctctatccaattgagctacgggcgcaaaaaatatatggtgcgggtgaagggacttgaacccccacgtcgtaagacactagatcctaagtctagcgcgtctgccaattccgccacacccgcatgtgctgtgcatcagcgacgtttaataatataccattagatcatttaaaaagtcaattgttattctaaaaaaatataaaaagtttttccaacgaagagtgaaagcgttgacaggtccttatccctttcatacgattaatggtagaaaaggagctgtttcttatgagtttatcacagtccattgaaaaagctaaacaattcgacgagaaagatccacttgcgaagtttcgtcgtgaattttatttgaatcctaacacgctatatatggatggaaattcacttggtcttctttcaaaaaaagctgaatcgtcccttcttcaatccctagaagactggaaacaccatggaatagacggatggactgatggtcaacaaccatggttttatatggctgaaaacctcggtgaaatgacatcaaacttaatcggcgcccattcttctgaaaccatgacaaccggatccataacaactaaccttcatcagatgctcgctacattttttaaaccttctggtgaaaagacgaaaatccttgccgattctctaacatttccttcagatatttatgcgattcaaagtcaattagaacttcacgggttatcagcagatacacatctcattcaagttacgagtcaagatggaagaacgctattggaagatgacattattgaggcgattgatgagacagttgcccttattcttctcccttctgtactttatcgaagcggtcagttacttgatattgagaagttaacgaaagcagctcataataaaggtgcaatcatcggatttgatttggctcactcaataggagccattccacataaacttcacgaatggaaggtggatttcgctgtttggtgtacatacaaatacttaaatagtggacctggtggagttggcggacttttcgttcataatgatcacctgggaagacgacctggacttgcgggttggttcagttcgaagaaggacgttcaattcgatatgagtcataagctaactcatgcagaaaccgcaggcgcttatcaaattggaacacctcatatttttagtatggccccattaatcggatcgttagaattgatgaatgatgcagggattgaaacgatacgagcaaaatcgctttccctaaccagatatttaatggaacttgttcaagaaaacttaacagaagatggctttgtgattaccaacccatcagaagatgatcggcgtggtggacacgtttgcttggagcatgatgaagccgcacgtatatgtaaagcgttaaaacaacaaggcgtcattccagattttcgttctccaaacgtgattagactcgcaccgattgccctttattcatcttataaagacgtctatcacgttgtagagattcttaaaaccatcatgcgagaaaaaacgtatcaacaattttctaataaacgaaatgttatcgcttaagtttgtatatttccaaacctccccattcatactaaacatgattaaaatgaaggagggaaactggatgagtcaacttaatgaacttgaacttcaaaacttacgtcatatgattggcggccacgaaacacttgcaaacaaacttgattcgtacgcggagtcgtgtacctgcccacagcttaaacaaatgttacaaaaagatgctcaagatgcacgtcatacacaacaacaattaatgggctttttaagctaaggagggatcttatgaacgaaaaagatatggtgaacgactatttatcagtgttaaacagtagcttaaacaattacgggagcgtgatttctcaagctgataaccagcaactccgtcaggctcttcaacagattcgtaataccgatgaacaaagacagtataacctttatcagtacgcaaagcagaaagggtactatcaacctgcagcgccagctcaggttaatgaaattcaacaagtcaagaaccaactgagtggtgcgcaacagcaacaaagcaatcaaccacctcaaatgcagtaaacgggagccggtgaaaaccggctctatgtctttatgctcatttttttcatgattttacaaatagcgtttcactctcccactatatggataattaaactagtactacatataaggagtgttggcaatggacgctattttaaatgcaataaccgagttttccgcattcatctggggttacccaatgatgatcttacttttaggcggaggattatttctaacaataaggttaggattctttcaaatcctgttttttccgcacgccttaaaacatacgatcggtaaagtattcaaaaaagaaaaaggtgatggcaccatttcacctttccaagcatttgcttcagcccttgcatccactgctggtgcaacgaacatagttggggttcctgttgccattgctttcggtggacctggtgcgattttttggatgtgggtagtttctattattgggatgtcgaccaaattctcagaaattgtgctcggcatcaaatatcgtgaagaagataaaaacggcgtttatgttggtggccctatgtactacataagaaaagggttaggctggaaatttgcctcttctctcttcgcttttggattaatgattgaaatcattcctagtgtcatggtacaaacaaactccatttcaacactttctgaaagtgccttcggtttacctacatggcttactggcgttattttaattattctgattaccgctgttgtctttggtggaattcgtagaataggtgcagtagctgaaaaaatcgttccatttatggttcttacatatattgctggtgcgatcggcgtcatgattattaatattgaggaattcccgaatgtaataagcctaatttttgtccacgcctttcaaccaatctctgctgcaggtggatttgcaggtgcaggctttgctgctgcggttagatggggactggctcggggactttattcaaacgaagctgggatgggtacggcatcaatcgcgcattctgccgcacacacgcctcatccttgtagacagggattatggggcattttcagcgtatttattgatacaatcgtcctctgtaccgttacagccttcactgtacttttgtcaggagcttggaaagatgtgaagccttctaatgcagctgatatggtgtctgatgccttctctggattaatgggacctacttggggacccatattcgtttcttctctattattgatctttgtcatcagtacgattggtgtactcgtgttttacggtgaaaaacaagctgagtacttatttggtattcctttttctagagtgatgcgtttcgtttatattctttcgatttttgtaggggctattggtggccttcaatttgtttgggagctcgttgatattacactcgccttgtttgttgttccgaacgtgattgccattctattccttagtaaggaagtaaaagaactaaccgacgattataaatttaacttcttaaagcaagctcaaacaaaagataaaggcattagttcatagatttttcctgggacattcacctaatttaggttctcctccgctcccgcctatatcatttctagacggcaacatacagtgataaagaaagagaaattaaagggggacctaatactatgtaccatgcaaacaatgcaccatacggaaacgaaccttatcagcctgtagctggagcttcatacggcatgccttgtcatcgacctgccggaaatggatttgcgctaatcgtcgttcttttcatcctgcttatcatcgtaggaacagcgtttattaaatgctagtccactgagcaagaaccaaatggttcttgctttttgcatgagtggaattgttccattttccattcgctgttatagtgataaagaatgtatgatgaaagaagtgattcaatgaaaaccattttaattgatatggactctgtcatttgtgatttgatgtcagaatggcatcgcaggtataacgaagattatcaagacaatctttctgttgaaaaccttatgtgctggcgctctgaagattatgtgaaaagcgaatgtggagagaaaatatatgagtacctggatcaacccggtatcttcctgcacttaaaacctcttccatatgcgatcgaagttcttgaacgactctctttaaattatgatgtcctaattgtaactagcagccgtacatatgcttataccgaaaaagaacagtgggttgagaagcacctcccttttatcggtaagaataatttgattttctctcatcgaaaagaaatgattcgcggtgacttattgtttgatgatgccccgcataatctgattgcctttaaaaatactggcagaacagcgatcgccatgaattatccttataatgctagcattgatgttcctcgtgttaacaattggctagagtttgagaaatggcttttaacatggaagtgagggcaaaactcatggaacaaaaaaaagatctcttaattattgggggaggaccagctggtatttcagctgccatatgggcaaaacgtctcggactgaatcatttgttacttgaagaaaagaatgatcttggtggtcaattaaatacaatctacaatcaaattgtcgattaccctggcatgatcgcaccaaacggccaatatcttcagaaaaaacttactgaacatgcccacaaaataaattttgactttgctttaaattcagctgttacgtcaattgattggaagaagaaaattcttaaaacaaccgccgatgatacatatgaatttcgctctttgctcattgctacaggatcatcacctagaaaactccatgttcctggtgaacaggaaatgatcgaccagaaagaagtatattcagctactcgagataaaactaaatttattaacaaggatgtagcagtaattggcggaggcgatcgagcttttgagggtgccttactacttgctgaggctggctctcgagtaacccttattcatcgttctgatcattttagagctcgtcaagaatataaagatcctgtgatagagcatgaaaacatctcgatccttaccggaacaatcgtaactggaattaaaggaaaaggtagaaaagttttatccttatctaatgaagattttcatgaaacaattgaagtggatggtgtgtttattcgaattggcgtccaagcaaataccggaccttacagtgaaggaattgcaattgatgacgaaggctatataaaatgcaatgcatatggtgaaacttcacttccctacgtgtatgctgctggagatgtttgtacgcgcccacttttgtctagcatcgcttctgcagttggtcagggaatgacggctgtgaaacaattatcgttttttctagaaaattaaaaaggacctgtgaggtcctttttaatttgtctctatttatggaaacgtacgatgtcttttaacagaagtattgcttcttccaaaaatcaaacaaatgataatgaagagaaaaatgccaatccctagataaaggatcgtgctacttgaaagaatggattctgtttcctcatccttaacttgtgcaacaggtttagcttcacttttttcctctggaacgttactttctaaagaagttgtcgttaataactctgaatccagaattgaatgatttgaatttccgacactctcgagttggttttcgtttgataatgtaagatcaatcggataatcgtcattttgatacagagtaatatcctctgaaagactgtattttttttgatttacaacgccaagttcagttcccttctcaaactcaaccggtgtaaaggcagtaaagccgtagttaagaagatttaatgtatcctgataagcgattttgtcatcagttgctttcatcgtaacagcaattaattcttgatcacctttcgaagctgtcgtgaccagggtaaagccagattttgatacatagccattttttccaccagtaacgaaatcataatcaagtaagaggcgatggtgattaataagggtcgtctcccagtcttccccgctccacgtcatttgtttcattccaaatagtgagcgaaactcttcatttttcattgcatactgggttatttttgccatatcctttgcagtcgtaagatgctctttatcaaaaagaccattaggatttacaaagtgagtgttctgaacgcctacttcttgtcttaaaaattcatttaactcattagaaaacgatttcacatctccgctcaaatgctctgcaatagcaattgcggcatcatttcctgaattaatcatcatacccttcactaatttatctaatggaactgtttctccttcctttaaataaactctcgtgccctctgctgctcgtgcattttcgctaacagtaaccatctcatccatttcattggactttaccgccattaatgcggtcgctattttcgtaatacttgcaggatacatttctgctgagctgtttttctcatagagaacctgtcctgtctttccatcaataaggatcgcggtctcacttctaatggttggcgtttctttagcaaatgttacgacaggaataaaactcgttgttaagcagataacgacaataagatgcgcaatgtgttttagactcatggaagctcctctttcttttacgtgctaactacattattcgttctatttctgaatgaattgtctagtaaaaaagacctgatccgcatttaattatagtctcctctgcttcatctgaatatagtttatttctttataccctattcaacaaacttttaacttaaaatcaatagttactggaattttaaaatgacaaaataaaaaaccgcttaaagcggtcttgttaagaagcataggatcctttccattgttctacaatatgttgtggcgcactccaacatagccaggatacaagtattttattttcttctgttaacaccatccaatattccactctttttttgtcaaagttctggtaaaatcctgatttttttataaaacgttccatactcaaattccctccagtttgttcgtgttatacatcattaaattctattaggaaccttcaaatcctctaaattttcagaaaactaaaaggcatttttcccataatgtccctttaacaaagttgtataacaagtctttctcctgagcatcatattagtcaaggaggtgtacacaacatggcaaacaacaatagctcaaacaatctggtagtccctggtgtacaacaagctttagatcaaatgaagtacgaaattgcaagtgaattcggcgttcaacttggtccagactccactgctcgctctaacggttctgttggaggagaaatcacaaaacgtcttgtccaaatggctgaacagcaaatgggcggcggaagctactaatcgctaactgaatagtatggataaaggaggcggagaaatccgccttcttcttattctccaagaagattagatgtttgaatcgcatattcaataagatcacctaaatcactaatttgatcttcattaattttacggttaaattctaataaaacctgtgtggataatgaaacatcctggtcaacctctgcataagggaaagaaacagtttgacgtatagtcgggcgatatccccagatggtacggatgtcttcttcaatttcagcacattcttcttcatctgatattatgacatcgaagtatattttaatttcacatccaggttcaatctggtctagctgtagctgttccgcactaaaattagcgaggtcggcgtatagctcgattgtcacatagacatcttcatttcccgtaaacttcatcaggtattttcttgaaagagatgcgagatctaccaaatcttcgcgacttacaatcgagatctctccttcaagatcccgatcataaagttctccttctaacactactttcacattttcataaatggttggatcaaacataccgtcacccccctatcgtttcactatatcatgaatgttggagggacaagtagttaggaatgacgcgggtgagatttagcaaattgaataaacgtttcttcatctccaatttcaccacatgcagcacattgaactcgaacatttggtcctttgtattccatatgaaaaggatccgcttttccttcctccataacagaaaccacttctcctgactctggatctaacttcacagaagttgctttttgctcaattttattaaatctcattcgattcgtcttacatcttggacacaaatatgctgtcataaactcactcccttttttattagtgttccactaaaaaaggaaattttattcatttagtatggtatgtgaaatttaatatttaaacgggaatctctcccgtcttacttcacttcctccattaacttttctaacacatattcaaccgattgtacccgctcattgaatttttttggccctgtatctttttgccaggctacaaccgaaatcatttcaatattttcaaacgtattcttaatttgaattggatacaaatatttaggtttattgtgcataacccactccctcgctaaaggctcccaatcctgaagaagcattaatgctcgatctgcaaatggtttcacttcttcataaaaattcaccttataatcatcaaggtgtgtgcgcgttgtatattgcactcttgcttcttcatttatttctaataacttcttagtcaattcacgtaatttttgtgtattttgcatgaccctcacccccaccattcctatcctaacacacgatattcgtttacatacaaaaaccttatatccaatagggacataaggtcagaagggaaccatattcaactctttctagaaactgaacagactcatgatccagggacgctttcctttgcccgtcgactgacctactgcctcttgtatagacgtgtgatcttcaagctcaatcaatttttcttccaacatgtttattttttgcattaattcatctagttctgttcggtgctgtagaacttgcacagtaatcacttcattcgctttttcctctaactgacgctcaagctgttccaatcttactgaaaaacgatctagtctttgttcaaaccgttctggagataccataacctgttcttgtgaaccgctcgttcctgatgatttgattttttccattgagtaaccccttcttaaatcatttttaatcgattttagttcctcaactgtttcgctcgaaaaaagaaaatgtccgagttcattcttctcacatgctaaatcaaaatactttacccacctttgaacagtagtagggtttacaccaagttcatctgaaacctgctttgttttcaataacatgcaatcccatcccttctgtcattctcaggcctttgcctgtaagtttgtataatacatattctctttcctctcttcattgccttcctcgctgacaaaactagaacggtttcgtcaaaggtagtggtttactgctaaaggaaagtattttcgacaaagaaggggcatgattttgtaacatctgatcaaactaagagtaggaggtggtacaaatgaacaaaaaacaaaaatttgataaaccaaatcagaaaacaaaacagcaagaaccgaaaactgggtacggaaataagaaaacggaaggccccgatcgtccttccacttaaagcagggtttatctcctgctttttttaatgagcaaattttctatttcaacagcaacacgaatttcgcttcttttcttttcataccaatccgataaggcaagttcagctggaagcgttatttcattatttagcattttctttacgagtgattgcccatggtaccaatcgcgtctttcttttcgatgatgatgaatgagcggataaacttgacgtaacatcttgccttctcgctttttattcatataccgttcatagtcaaatcgcgcccctgtaggatacgtatttgtagcgaaacgataaaactcatcaaaatgtgtcggatgaaagagcagtttagccaatttttttccaagctcaatgcgatctttcgtatgacggaaacgactgaccgacaaaccgtataactcaccgctcatagttggaaaaagaaccgtactaaaatgaaaccaatcttgaattgtaaaaaagaaagaatgaaaaacttcttttgcataggtatgatgttccattactggtgcttcaatcacatgctgttcattaataattagtgccgtcattaaacgctcttcatcaccagtttggaagaacttttcccattcctgcaaaataaaatccgatattcctaatttttgtccaagctcaaaaaaagatttgtttcttcttttgctaacttcgtatagcataagctgtggcgctgcatcatcaaatattgtccaatttgctcgttcatatgtcatgaagaagttgattaactgtttcttcgttaatgcttttggaaaccactctccctgtaaatcacacatactccaacctgcattccgagaaaccattgaagctagaaatgcccatttgatttctggattccgttgataatagtgatgatagaatacggtacgtgaaatattatccatattccactttttcgtttctcttctaatttgacgaatgatctccaacacgtttttcacaacatttttcacctgcttgaaacatttttgtcgtacaactcgtattaagtaaagtaaaatagattcagtgcaccttctaaatagaaaggatgattaacgtgccgattcgatatccgaacggaaagccgtacgtcccttcggctcagaatcagctggcaagtcaaaaacaaaagtcatatagcaatcgaggtatgacactagaagaggatattaatcagagtaatacgtattatctctcaacaggtaaagccgttattcacaaaaagcctacgcccgtccaaattgttaatgttgattatccaaaacggagtgcggctgttattaaagaagcttacttcaaacaggcttcgactaccgattataatggagtctacaaaggaaaatatattgattttgaagccaaagaaacgaagaacaaaacgtccttccctttaaataattttcatgaacatcagatcagtcatatgaaacaagtacatgatcatgatggaatttgctttgtccttctccgcttttcgatcactgatgaggtttttttacttaatgcagttgctatcttttctcattggcaattaatgaaagacggcggcaggaaatcgattaagaaagaagagattgaaaaacaaggaacacatatcccatacacctttcaaccacgcattgactatctgaaaattattgataaaatgtatttcagctaatgaagtcttctatttaattcataaaacaatggattcattcgaatcctattactagtacaggtttgaaaggcaggaatattcatgagtgaatatcaatcacgtcaagaaagacgtaaaacaagtagcaagaaacagaaagctcccaaaaaatcaggtaagaaaggcattttcaaaaaaatctttcttacattagttgttttatttctagtcggtttagtcgctggaggcataacagcaattgcctatattaatagtgcaccggatcttgatccagataagctgacgaatccacagtcatctgtcattcttgaccgagatgatgaagaagttcaaacaatcgaaggcgctgatgcaagagaagtagcaaaaatcgatgaaataccagatgttctaaaaaatgcgtttgtctcagttgaagatactcgtttctatgaacactttggtattgacccaagaagaattggtggagccgttcttgcaaacattacaaacggtttcggagctgaaggagccagtacgattacgcaacaggtaattaaaaactctcttttaacatctgaaaaatcgttagaacgaaaagttcaagaagcttatttatccattaagcttgagcaagaatattcaaaagatcagattctagaaatgtatttaaataaaatttattttggtaacggagcatggggtgtggtcgatgccgccgaaacgtactttggtaaaaatattactgaagaagaattaacaccaggtgaagctgcactacttgcaggattaccacaacgtccaacttactacaatccctatgaatatccagatcaagctgaacagcgtcgaaatgtcgttctaagcttaatggaaaagcagggtgtaatcacagcagaagaagctgataaatatcaggctgaaaaagttggtgatatgattgtggcacttacggaagaaaaagaaagcgatcaatataaagtctttatggatcaagttgttaaagaacttcgcgaccgtgacgatatttctgaaaaagatatttactcaggtggactagaaatttatacaacgcttgatactcgcgctcaggatattacgtctaacgtgattgcaaactacccttattccaatgaagatatgcgttcaggtcttgtcctaatggatacgaagactggttccattcgcgcaattggtgaaacacgtaaagatgagagtgtcattacgtacgctaccactggccaatttcagccaggatcaacggctaagccaatcattgcttatggacccgccattgaaaacatgcagtggtcaactggccgatccattaaagatgagcctttacaaataggtgaagcaaatatccgaaactgggaccgcgaatatcgtggacaagtttccatgagacgtgctcttgaaatgtcttataatgtaccagctgttaacacgttccttgaagtaggagaaaagcccgctcaagagttcgcaaataagcttggaatgaacttagaagataaccaaatggttcctaccgctgctattggaacatttagtacctctcccctccaaatgactggtgcatatgcggcatttggtaatggtggaacgtacaacgaaccacataccgttcgaaaagtggtcttcccggatggaaaagaaattaatctagagcctgaaccggagaaggcaatgaatgattataccgcttatatgattagcgatatgctaaaatcggttgtcgatgaaggaacaggaactgatgccaaaatacctggtcttcccgttgcaggtaaaacaggaacaacaaaccacgatgctgataccattcaacaacaaggatttccaacatcgggaattgttaaagatgcctggtttgcgggatacacgactgaatactcgatggccgtttggacgggatataacaaaccgaacgctcattaccttgattcaagtaaaggtgaagacgatacgtctaaactgattttcaaagaaattatgagtcaagtatcagaaggcattaacacggccgacttccagaaacctgattctgttgtagaagttggcgtagagaaaagcacggggcttcttccaagtgactacacaccgaaagatcaaatcgtgtatgaactctttgttaaaggaagcacgccagaaaaaaagtctactaaatatcaacagcctgatggcgtaaaaggtctatctgcccagtataatgctgattcaaatagcatttccctctcctggcagcctggtgaagataaatccttcacctataaagtcgaaatggctgtaaacggcggtggctatcaagggttgacggaaacaggtgacactggatttaccgtacaaaatgttgaaaaaggtagcgaatataaatttaaagtaacagccgtctcagattcaggcgtttcaacgaaaccagctgaaacttctgtatcggttccgaaagaagaagaatcagaggagcctaaagagcctgaagagccgacagaagaagaaaatcctgaagaagaaggcgaaacgccacctgaagaaggaaataatgagcaaggtgaagacggtagcggcgacaccgaaggtaaccagggagatgaagagcagcctcctgccgataatcaaggtggaaatgctggcggaggagataatcaagggaatcagggcaacaacggttcaggaggtaatggtgaagatggttctggtaacaatgctggaaccactgagcctgataatcctgaagataccgagaatactgaagaacccgctccagagggaaatgctccagctaatgctccacctgcaaatgaaaacgaataacgtcaaaaagcccactctgcgtatacacagagtgggcttttctctcttatttacattagcgctaactattctttacttaccacgggcttgctgcttcattcgtttttgcccttctcgacatagttccaatagcgggcagatttcacactgtggagattgtgctttacaatggtaccttccgaagaaaatgaagcgatgatgagacacagaccactcttcttctggtattttccgcataagcgttttctctacttcaagtacagagtccttccatctgcatattccgagccgcttgctcactctctcaacatgcgtatcgacagcaatggcaggtacgttgaatgccacggaagcgatcacgttcgctgtttttcggcctactcctgctaacgccattaattcgtctctcgtctcaggaaggacaccgttatactgctctacaacggttcttgctagctttttaatattttttgctttgtttcgaaacaggccaatgcgtcttatatcattttctagctcgtcaattggcacatgaagaaaatcctctggcccattgtatttctcaaataggcccggcgttaccttattaacaagagcatctgtacactgagccgatagcactacagcaatcgcaagttcaaaaggtgtcgaatgattcaattcacagtgcgcatcaggaaacatctctcccattgtttcaagaacagtttgtatttgagctttcgttaacaataagtccaacttcctttcttacgttcgcaacggttttcatttcttcacaaacaaaaaacggaagccacacttccgctttcttgatacctatttatcgtccaagccaattgtagattggtgcactttgatttgaatcatttttcgtttctgttttagcaggcgtttttttatcgtactgatgctttcgaaacttttcgccataggccctcgcctgttctaccgttttgatgccatttcgtttccattcaaaaagaatgcggtcaatgtagcggaagtttagctttccaccaagcacagcttcttttaacgcagctttgatcaactctgcatcatgcttgtcggcatcaatccacatcgcaagcgtctcacattcaattggcgaaagcggccttgcaaactcacgctcaaataacgtataaaggctttcttcctgctccatgtttttcactgcggatctttctgcttcttcctgctcgattgctttaaatattctttcccacaatggaagaagtgaataggcttctgaataataacttttcagatcattctggtgttcttcaattgttaaaacacctttttgcatcagctgctgtattttatccaaacaaacttgaggcgaataggtcatcgctgaagcaagctcttctggcgttggaaaagtgtttccctgttcaataaaactgtgtagcttaattaaaaagaaagcatcctcttcttttaaaccaatatgaacatagtggtttagcaacaatcttggtactgaaacatgtccttcgttcatcatatgaatgatttgttccttcttcatcccatccacctctacctttcattatagcatgccggcattttgtgatgggagtagaaaaaaatgcctttgctacgtgcaatacattttttaatctatcctctaatattatccatctttggtacttgaaatgcttctaccttcggcaatttttcagataaagacgcttctctcataacgaaagaagcgtcagctttgttagtttatcatggatatagacgatttaaaaggcgtgggaacggaattgtttcacgaacatgttccacacctgaaagccaggcaaccgttcgctctaaaccaagaccgaatcctgaatgtggaacagatccataacgacgcagttcaagataccacttataagcatcgtctgttaagccgtgttcctcgtagcgtttttccataagagataaatcatcgattcgttgactaccgccgataatttcaccatagccttctggtgcaattaagtcagcacataaaacgacttcttcgcgctctgggtctggcttcatataaaaagctttaatgtccttcgggtagtttgtaataaagactggcttctcaaagctttcagcgatcgctgtttcatgaggtgcgccaaagtcttctccccactcaatatccgtaaatcctttatctttcaataaagtaatggcgtcatcgtaagaaatacgtgggaatggcgcttgaatcgcttcaagtttcgaaatatcgcgctcaagagtttttaattctagttgacaattttctagtactgatttcacaaggaaactcacatattgttcttgaacctcaagactctcatcgtgattcataaacgccatctcaggttcaatcatccagaactcaattaagtgacgacgggttttggatttttcagcacggaacgttggaccaaatgaaaaaacgcgtccaaaagccattgcagctgcttccatgtaaagttgtccactttgagaaagataagcatcttcttcaaaatattttgtatggaagagatctgttgtgccttctgccgaacttcctgttaaaataggcgggtcaattttaacgaaatcattttcgttaaagaactggtacgtagcgcgaataatttcatttcggatacgaagaatcgcattttgacgtcttgaacggatccatagatgacgattatccattaagaattcagtaccatgttcttttggggtaatcggataatcgaccgcttcatgaataagctccacgttcgtaacggttaattcaaagccagattgagatcggtcatcttcacgcaccacgcctgttacccaaacggatgattcctgtgtaagatttttcgctgtctcccatgcttcttcagaaacttctttcttaaccataactccttgaataaagccagtaccatcgcgaagctgaagaaactggattttaccactagaacgtttattatgtaaccaggcaccaattgtaacggtttgttcaacctgtttatttacatttgaaatcgtcgttttcactgcttatttccctccaactgattagaaaaaattggcgcacactctccattcttaatgagaatagtgccatgcatctatttgttaagatggctaaatcgaatgttcggtacttattataccgataatttgtatcttgaacaactcgcttaagcctgtttcgtttttacgaatcgctcgatacgatcaatggcttcaagaatgacttcgagtgatgttgcgtaagatagtcttacgttatcaggcgaaccaaatcctgagccaggaacaagcgctactttttcttcttctaaaagtccttttacgaaagcatcaaccgtttcataccctgttttctctgctgcttcttttgcgttagggaacaggtaaaaagcaccttgaggtttcacacaagtaaatcctggaatattattcagtttttcataaacggtgttcaatcgttcttcaaatgctgttttcatctcatttacaggctcctgggacccttcgtaagctgctaaagcagcatactgtgaaatagatgtaggatttgatgtagaatgacttgctaaattcgtcattgctttaatgatttcttttcgtcctgctgcataaccaattctccatccagtcatcgaatgagatttagatacgccattaatgataatcgtttgttcttttaattccgtagaaagttctgcgatggacgtatgttttgctccatcataaacgagcttttcataaatttcatcagaaacaataagaatatcgttttctaaacaaaaagcaccgatttctttcaactcatctggtgtatagatcgagccggttgggtttgaaggagaattaataataaccgcctttgtttgaggcgtgacggctttttctagctgtgccactgttattttaaatgcatgatcttctttaccttctacataaactggatttccaccagctagcttaacttgttcaggataacttacccagtaaggtgtagggataatgacttcatcaccttcatcaagaattacttgaaacagtgtataaagcgcatgtttcgctcctgtacacacaatgatttcatcagcattgtaagcaatgttttgatcttcctgaaactttgcgataatgctttcttttagagggagaataccacctgaaggcgtatattttgttagtccctcatccattgctttcttagctgcattaagaatatgtgaaggcgtattaaagtcaggttcccctgcaccaagtgcgattacatcatgaccttcagctttcaacgctttagcttttgctgtgatttctaacgtggcagatggtgtcagagctgctacacgagttgataattgcatttctcttcctcccttaagtacattaactttgtttaatcgaccgtgatcgccagtagtccccattactaaagtaataataagcaaacgtatagcgattgtcggtatcaataaacgttgcttcccatacaagtacttgtttcttttcttgattcacttcaatacctggtttaatattaataatctcttgtggagaaaattcattgttcaatttctttttaaccgtttctgcactaacgccttcctccactttctttgttataagaggttgatcgttgtctggcacaaaaacgtaaacctcatcatcgttctcatcgcttccttgtaagacgacatatgcatgactcgtcccatgatattggacggcattatcaacttcttcgattactgcttcagattcagctcgagcaatcgctttgtcctctaacttattaggatgatccgtaatggcattataaaaggatactccttgccatatcatcaatgctacgataacaccagcaataattcctatcagtcgcatactatcaccctattatgtacgatagatcgtgaaaatcatttgatcctgatcttcttcatcaagtgcaagcccaaacataagatctttttcttttaacgtacgatttaacgaatctacaattttgtaaatatcaagggacttactcacttttactgtcgataaaacttcaatgttgctttccattcctgtcatctccctatgctatatgtgttgatgcctatgtggagtgctgcgcttgctccgggataaatttactacttatagatggcaaaaggtgtgacaaactataagtaccgtcagagacggtgcattaaatctgctccacttccaacagtgcctgcgccatgcgcaggctattttttacgttgttttcttaccaaatcctaataaaaaacattttctcttcctattcttaaataagttccgtttttttgcaacaatttcgatgaagaaacttttatcttgtttcttttgtaggaagtgttatgacatcatagcgatcattttgaatacgaagggtcacacttccaattcggtaaggatagtaaacgtccgtccagctttcattcaaacgttcgagtaccgattcacttacgtcaatgttgttatgccgaaagataacggccatctgtggatcaatcgcactaagaaattcggttgaactgccatttccagcaccaaaattagccactttcaaaacttctaccgctctcccggaagatgcaatttcttcttcaagttcaagatttgtttcccccatcattaataaatcctgacttcctaaggatagcataaaagtaacggaacctgtcttagagatgttcagaatttctacattcacatcctccatcagctcaagctgttgattttcttgaatatgctgtttttgaaggtgtgatggaatagatgaaagaaaagccgtttctactccttttgataaaaacacttcttctacatcataatagcgaagcaaattggaaaaattccctgtataagcttcatccgcattggtaagccaaacttttctaatttcctttaccttaaacattttcagtcgatcaattaactcttgttcggaatgagaactacctgtattaattagcaccgctccattttcttttgattgaagaagaatggcctctccaattgaaaggtcaagaaacgtcactgccacttcatgatttcgtaaatgaagatcaacagattgaattgaggcttcagcacccgttgcaccgagcataagaatataagtacttatcatcaacacaagtaatttcttcatcacaatccctcctcataaaagtagtttgtgatgaagatgtgcattataaccagagatctagttcatttaccaattcttctgttgtccctttaattaatgggacatccggtaaggattttacaaataatcgcccataccttgtcgaaatgatgcggcgatcgaatataaatactgcacctcgatcacgctgcgagcgcacgagtcttccaaacccctgtttaaagcgaataattgcttcaggtagcgaaagttccataaatgggttaccacccgaacttttcaattgctctgatctcgcctgaaaaacggggttgtcaggtggggagaatggaaggcgaacgatgataaggcaacttaaatcttctcctggaatatccacaccctcccagaagctactcgtaccaaacaaaatcgcgtcttcactttctttaaaattctttgttaacctaaccctgcttccgctatcaacaccctgactaatcaacgttaattcatcatgagcgattaattctttcatccgatgatgtgcttttttaagcatgtcgtacgatgtaaataagacaagcattcttcccctcgtgacgcgggcaatttgaagaatcgcatccgtaatatgttcaacaaattgaacatccgatacatctttaatcataggcaaatctgtaggtatcatcagtcgtgcttgctcactataatcaaatggagaatgatattgatgaataagcggcccaaattcttccaaaccaagtcgcttcgtaatataatcaaacgaattcttcacagtaagcgtagcggatgttaacaatatactttttttctttccgaagtagtcgcttgaaagtagggaacccacttccactggtctactgaacaaaaatgccgaattcaacgatcctttaggatcaatttctacccactttacatcgttttcactttcactaagaagaagatagtcgacttttgaaagctcctctaaaacagacgcatgaatacctttaaagtcagcagaggtatttaactgttctctcgttagctcatcttcttttaaatcaagttctttctctagcttcttcaatgatttatctagatctttcagatagaaaaccaaacgatgcgctgcttcttgaatcgcttcccatgctgagccattctcacctgtaatccgataacttaatcgaccaatttcatttgagcgatgaatgtttttttgtacgtaccgatgaagcatacgaaaaagttcatcaacgtctccaagaatcgttttcacatatgcatcaatttcattttttgtttcttctacttcgacttccaggttttttaaaatgcttagaacttttccataaattccgtcgccatcctttagtcccattcggacaaatccctgtagaatcgagaaataatcggttttgatgccaaaaaactcagtagcaatatcttcaagatgatgagcttcatcaatcacagcctgctgataagccggtaataattgatgctcattaattaaatcactaaataataaagcgtgatttgtaataatcaaatccgcattcatcgcaaagcgttttctacggtgataaaagtcacgcgaaaaccatggagaacggtgattagcagaaacagctgcatcacttttcacctgatgccagaaaagctttccaccgctagaaagatttaattcttcaacatcaccataatccgtttcaagcagccagacgagaatttgtgccttcgttaaaatcgtatcgtaattgtcttcttcaacgtgatgtagctgctgttcgaatcgggttaagtctaaataatgacttcttcctttgataatcgtagctttaaaggaaaatggcaagatatcacgaagaaaaggcagatcccgctgtagcagctgttcttgtaattgaatcgtatgggtactgacaacaactggcttgccggagtttttagcatgaacgactccaggtagtaaatagcctaatgacttacctatacctgtccctgcctcaatgagaatatgttgatttgtatcaaaggcatgagccacctgcttcatcatatcgctttgacccgttcgctcttcaaagtccgggattgtttcagccattttttgttcaaactctttttgtgcatgctcaaattgaatcgattgatggggagtctccacttcaatggtttgttcttgtaactttatcgcaatatctcgaaagatctcaaaataaccttctggttcaatcctattctttttgtcttgcataatttcatgtaggaccacttccatatcgctgtatagtcgagtagaaagctccgctaactgttcgagtgttacaagtggtaaaccatacagtttatcaaaaagaaagagcaatagttcagctgttacttcagcgtcgctatctgcttgatgaggattatcatgctgaatttctaaatattctgcaagtgaagataatttatatgcttctgctgttggcaataaaattcgggcaagctccaccgtgtcaatcgttggtcctgtaaacggatcatatccactcacatcaagctgcgcattcataaagttaagatcgaaacgtacgttatgggcgacaaaataagccccatccaatcgtttgagaagttctggagccacctcttcaaataatggtgcatctttcaaatcttcatccgttatcccggtcaattgttgtataaatagaggaagtgatttctcagggtttacaaatgatgcataccgatcaacgatcactccgtcttcaataactgctaatcctatctgaataattcgatccccatttttaggggagtttcctgtcgtttcaaaatctataatggtatatcgattcatacgttttcacctcagttgcttcaacccttcaagcggttaccttcattactttatcattttttctcttgaacggaaaatattttctaattcatttgaactcattttacctaaaagctttctaaaacatagtcccgctttactttagaaggaagcgttctacatctgagagcacgcatgggataagaactttccatatcacccttcaaaaaaatgccctggacaaggtccagagcatttgcttataaaattgttgcttcaggctctagcccaatcatatcaacgatcgtattatgctcattcataatggctacgcgcggcgtaaattgttttgcttcttcctcactcatcatggcgtaggcaacaataatcaccacgtctccttcttgaacaagccgtgcagctgctccatttaaacaaacaactcccgatcctctttcacccggaataatatatgtttctaaccttgcaccattattattatttacaatttgaactttctcattcggaagcatgcctacagcttcaataatgtcctcgtctatcgtaatgcttcccacatagtttaaattagcttccgttacacgggcacgatgaattttacccttcatcatagtgacaaacatctcctacactcctatcgcaatttcatttcttgttgtaactttgttgtctatgagtcgtgcagcagtaaattgaactgctaccgctactatgatgttttctttaatcacatcaatggtttctaacgctggatatgaaagaacttcaacataatcaatcactccagatgtttggtttaaataagaaataatcatttctttaatacgtgctggattcgtttcccctagctcaatcgcatttgctgcagcatcaagactttttgacaactgaatggcctcttttcgttcagttggcgttaaatatacattacgcgagcttttcgcaagcccatcttcctctcggataattggactagggacgatttcaacgggaacgttaaaatcctccacaagtccttttatcacggctacttgctgagcatctttcataccaaagtacgcgcgatctggtaaaacgatctgaagcaatttcataacgacggtagctactccatcaaaatgtcctggccttgattcaccacataacgtatcgacacgttcttgaactgttaattgtgtggtacgttcttttggatacatctctttcacatttggatagaataggatatctactcccgcctgtttcgcaagttgttcatcgcgcttcaaatctctcggatagcgatcaaaatcttcattcggaccaaattgcaaaggatttacaaatatgctcatgataacgcaatcattttgtttcaccgcttcttctacaagactcatatgtccttcatgaagataccccatcgtgggtacaaagccaatcgtccggcctgatcttaacatttttttagaaaagctctgcatttcgttgatcgtcgttatgattttcatgatctcgtccctccgtacatccccgatagctgctcttccttcatattaaacgagtgcttttcctctggaaattgacgctctttcacttctgcaacatactcaccaatggccttcgaaataacgtttgaaacatgactatactgcttcacaaatttaggtacatgacctgtaccataaccgattacatcgtgataaacgagaacttgcccatctgcctgaacacccgctccaatgccaatgactggaatagaaagctcatatgccacaatttccgttagctgttgagggacacattccaatacaagcgcaaaggctcctgcttcttctattgcttttgcctctctaacgagtaaggcggcactatcagattcttttgcctgtactttatagccacctaatactcctacagattgtggtgttagccctaagtgtcccataaccggtacacctgctgtagttaactttttaacttgtgaaataacttccccaccgccttcaagcttaactgcatgagctccagcttcttgcataagtcttcctgcatgtgcaagcgtttcttgaaaactactatgataggtaaggaaaggcaaatccgttactacaaatgtatgaggcgctccacgttttactgctttcgtatgaagaaccatatcatccatcgtaaccggtacagttgaatcgtaaccaagcgccaccatgcccaccgaatcacccactaacaatagatctatccctgctgcttctgctagttttgctgaaggataatcatatgcggttaacatcgcaattggctctttgtttactttcatctttttaaaatcgcttgtcgttttcatctttttcctcctttttttagaggaacatctcaccgcacaaaaaacctcctaacatggaaatacagcagacaggggtatcccatcagtctatgtacgcatagacttgccgcaaaactccacgttaggagattacttcatcggttttatccctctgtcccagtccatacggatcaaggcagactattattttagtaagaataaatggtgcggttctaatcagataccgcccttacacctgttagtatagcagaaaatatgacacaatcgttaacagatttcaatatctgcagaataaatatagtgcatcttcccacttttatcttctaaaagcagaacgccttcttctgtaatcccttttgcaaggccttcgataacgccatttaacgttcttgcctttattttacgacctagactaactgcatagctttcccaaagaagtttgatcatcctaaatccattgtttagatattcttcataaagcgtttcgagttcatttaatatggccgccagaagggctgatcgagttatgtccctgccagactcaatcttaagtgatgttgcggtcgttaactcatctggaaaatcttctttactcgcattcacattaatgcccatcccaataatgattgacttaatttgatctgcctcagcctgaagttctgtaagtatgcccaccactttttttccatcaattaaaatatcattcggccacttaatttctgcttcaagtcctgtttgcttacgtatcgcatgcaccacgctaaccgcagcaatcagtgtaaactgcggtgccctctgtggcgggagtttcggacgcaaaataatacttgtccagatcccgctcccactaggagagtgccaggagcggccaagtcttcccttccctgccgtttgttcatcagctacaatgatggtgccatcagaagctcctcgatgggccaaatcatgcgcaataaactgagttgattcgacagtaggatacgtataaatggtttttcctagaaaattggtcgttagcttaagagcaatttcttctttacttagcatatccggtctcgaaacgattcgataaccttttttttgaactgcttcaacttcgtagccgtttttcctaagttctgaaacgtgtttccaaatagctgttcgagatacattgagcgtttcacttatcatctgacctgaaacgtagttttctgcatgctcttcaagcatttgcagcaggcgctgccttattgagtctgccactgtttaagccaccttctaatgctggatttctcatttttaatttcatcattgattacggctagctcaatttgctttagagcctcaccaacccacggtcctgggggagtctctctccagtgaatgaggtcctcccctgtcacagcaagcattttggaggaggttatcgcaaggtctgaagtgatctgttccacactttcaaaaagtggacgacgcttttcaaacaccgatcgaagtctctcacatgacttcacttctggaagtgcattataaacggtttccttattccaccctttatcttgtgcattctttacattttctaaaaggtgctccacttctttaataatccgatttgacaatcgccacttttttaaaaatagacttggcttttcagtcgtggaagatagccacgcccaccgctctatttctgtcgttaaattcaccaaaaaaggaatttcatcaaatgattgttcaatttgttgaagttctggtaaaacgagatgaacatttgcctggacaagtgcatggagtgcttggtgtacagcttttccagctagtagtttgctgaactccatttgaattctttcaattgcaacatattgaagcaaatccgcttgttcctttaacgcttgttcagtttgttggtcaagtgtaaagttaagcgtgctttgaaatcgaagggctcttatcatccgtaacgcatcttcttgaaatcgttcatccggattaccgaccgtacgaatgagacggtttttaagatcctcttgtccactatataagtcgataagtgttccatctattggaagcgccaggctattcatagtgaagtcacgcctcgcgagatcttcctctattgaacctaagaaagagacagcgtttggatgtctaaaatccttataagatgcatcagttctaaatgttgttacctcgtatgaaaacccattatgaataacagtaaccgttccatgatcgatccctgttggaatgactgtatgaaaaatagccatgatctcttcaggtttagccgaagaggcaaggtcaaagtcagaaacaggtaaaccgagtaacgcatctctcactgctcctccaacaatatacgcttcatgtccggcgtcctttagaagttgtagcacctcaagacaacattcataagctctacccgtcaatctaatcaagtaagcgccccctgaagcgttttataataaatcgcctcatactgttctaaaatgcgttgggaagcaaaccttgtttgaacggctttaaccgcagccgaactcattcggttatgcaactctttattcgatagtaactgcacagcataagcggagatgatatcaacctcaccaacttctgcaataaacccgttcacctcatgttcaatgacttccgggataccgcctatgttcgttccgattgcaggtacgccacaggccatcgcttcaagagcaactaaaccaaaactctctttttcagatagcaataatttcaaatcacagatagagagaatttcagctacattttcttgtttaccgaggaacttcactttatctcttaaccctaaatcgtttacgagtcgacaggcaacttgaatttcagggccatcaccaatgagcaatagctttgcaggcatttctttctggatgcggtgaaacaccttaatgacgtcaggcacacgttttaccgctctaaaatttgaaatatgaacaataaccttttcctcttccgtaatgccgtaacttttcttcaagtcggcgggaggttttggataataaattcgttcatctacaaagttatataccgtgtcaatcggtttgtctgtttcaagtaatcggtgtgtttgatcaacaagatcgtttgatacagctgtaacgcgatcagatttttcaataccaaatcgaattagttgtgttaacgaaggatcatatccaagtactgtaatatctgttccatgcagggttgtaacaattttaatatctcccccaaccatttctttcgcaaggaaagcacaaacagcatgcggaacagcatagtgaacatgaaggagatcaaggttttctcgttgaatcacctctgccattttactagcaagggttaaatcatacgggggatagcgaaaaacagcatattggttgacttcaacttcgtgaaaataaatattggggtgaaacgtatcgaggcggaacggaacgctacttgtgataaagtgaacttcatgccccttttcagccatcatctttccaagttctgtcgcaataacgccagatcctcccacagttgggtaacaagtaattcctatttttaatgtcatcgtctttctcctaacggaaattcttccaagcacatcagattcttcgcaataaacccttctgcatagtctactcctgattctttaccatataaatattctcgatgaatcactttatcaacgtacccatttgttaaaggagtggatacactatcgggcgtgagagtaaattgactctcatacgcttcaagcgattgtctttttgcctcaatttgattactgatgttaatcgtaaattgaggacgatggaatccgttaataaagtaataatagatttggcttactttatgagcatctcctaattgtggatggtatttccgaatgcccgctgaaaaaacggcttcttccactaatcgagccgcatgaccatgatccgggtggcgatcttctgagtaaggaacaaaaacaatccgcggctttttcttgcgtatgattttaactagtgctgaaagcttatcatctgaaatacccaatccgcgatcggggaatttcatatttaaacgggttgttactgacaaaatttcagccgcatgctgggcttcgtgatgtcgtgtgaaaacagtaccgtttgaagaaagttcagcctccgttaaatcacaaatccctgtcgtcctgccatcttcagcgaatttctttagtgtgccacccatcccaatttcaacatcatctgcgtgggcgccaaacgcaagtatatcaagtgttatttcttccatgtacaatttctctccaatccaattctccccttgccagggcgtggacaagtatttccgcactgcccatattcgttgctagcgggatatcatatacatcacatagtctaatgagcgcggtaatgtccggctcatgcggctgtgctgttaggggatctcgaaagaaaatcactgcatccatatcattttctgcaatcatcgcaccaatttgctgatccccaccaagaggaccagattggtaacgatgcacgtttaagccagtttcatctatgattcgctttccagttgtcccagtcgcatacaggtcgtgtggatctaaaatcattttataagctagtgtaaaacgaacaagatcgtcttttttcttatcgtgcgcgattaaagcgattttcatgagaacatcccctactccattatattttcaagaccgtaaacaagctgatcgatttttaaaaccgtttcaacagcaagctgtacacctggcataaaggacgctctgttcattgagtcatgacgaattttcaatgtttgtccttcgcctccaaaaagaacttcttggtgggctacaagacctggcaatcgaacgctatgaattctcatgccttcataatctgcaccacgagctccagcaaggtcctcacgctcgtcttcatgcccctgcttcttttcttctcttacttctgaaatcatttttgctgtttttaccgccgttccagatggtgcatcaagttttcgatcgtgatgttgctcaataatctcaacatcagagaaatatttagctgccattgtagcaaatttcatcatcaaaaccgcaccgatcgcaaagttaggagcaataatcgcccctaattctttttctgctgccgttctagatagttcgtccacatcttcatttgaaaatcctgttgttcctacaacgggtctaactccatgatcaaacgcaatttgcatatgctttttcccatattcaggcgttgtcaagtcaatcaagacgtcacattctacttcagataaacattgatctagatccgtatagataggggaatctagtgatggaaggccactaatatctgccaccgtttgtccagacgatttacggtcgacaacagcagttaacgtgaaatgcgctgtccgatcaacaagttttactgcttccatccccatattccctcttggtcctgcaataacaattttcacttcttgcatcagtcgccactctccttctcgatttttgtccaacgatctttatctcgcgtttggaacttattcatcactcttccaaatgcttcatcaaggtcaatatctaacgaattcgcaaaacaagtaagcacaaataaaagatcgcccatttcatcttcaatggtccgttcctcttccgaattcttttttggtttttcaccatggtaatggttaatttcacgtgctagctcaccaagttcttctgtcatcctagcaagcatagcaagtggactaaaatatccttctttaaattgacttatgtattgttctacctcttcttgcatttcatgtattgtgcgttcagacacgaaccattccacctttcacatcagttcttatgttagctaaaagaagaacatttgacaaatgtttcacacgaattcctcttattaacttatagcgagtataacagaatgaaattgctgtctgctcggtatttgattataatgtagattgttggttcatacgttaggagtgtcggatatggaaggtatacgaacaaaaaatgtattctttattttattaggctctgccatttttgcatttgggcttgtgcatttcaatatggaaaataatttagctgaaggtggtttcaccggtattacactattactttattttctattcaatatcgacccagctatttcaaatcttgttcttaacattcccttatttctcattggctggaagctacttggtcgaaaagcatttatttacacgattattggaaccgtttccttatctctgtttctatggatctttcagcattattcagcgctctcaatacctctacaagatgacctaacacttgccgccctctttgcaggtgttttcgtaggagtaggactcggtattatttttcggtacggagggacaactggcggcgtagatattatcgcaagacttggatctaaatatgttggatggagtatgggaagaacgatgtttgtttttgatttttgtgtcattgccatatcacttgtttatcttaattacaaagaagccatgtatacgcttttagccgtttttgtagccgctcgtgtgatcgattttattcaacaaggtgcatacgcggcaaaagctgcgatgattattagcgaaaacaataaagaaatagctgatacaattatgagtcagatggatcgcggcgcgaccgttttaaacgggaaaggcagtttttcaggattacagaaagaagttctctattgcgtcgtagcacgaaatgaaatcgtacgcttaaaaaacattatcaaacaagtagaccctcatgcttttgtagctgtaaatgatgtacatgatgtgcttggtgaaggatttacgcttgatgaaaataaaaatccaattgaacagtaacgtcaccgctaaataggaaaaacaaatgaactaaaaaaatctcgccagtaggcgagatttttcattaatcttcgttcattcctataaagatgaacacaaagcgtaccaactctaatagcgcaacaactgctgctgctacatatgttaacgcggctgcattcaatactttctttgtttctctttcttcgtcatttcgaatcacaccagtggaaacaacttgctccattgctctgttagatgcattaaattctaccgggagcgttactaactggaacaaaacagctgcactcataaaaataatccctagcagtataaaatttgcagaagacatgagaataccagcaagaatgacaaaatagctaaagtttgaaccaagattcgctactggaacaagcgtatgacggaaccgaagtggcgcatagtcttgctcatcctgaatcgcgtgtcctacctcgtgcgccgctatggctgcacccgctacggaatgcccatgaaagtttcctgatgaaagtcttaccgtcttagaacgtggatcataatgatctgaaaggtgacctcgtacttcttctacccctactgaatacaacccattttcatcaagaatttttcttgctacttgggcaccagtcattccagaagaattaggaactttggagtattttttataggcgctcttcactctgccctgtgcccagagtggaatgattaacaaaagcgcgaagtatattagaaaaccagccattttcattcctccatcacatgtgtaattgcttttaaaactcttattaacgtcaattttagtcaaattcatcttgaaagtcaattacacagtttcaggttcacaagatcttcaaatttaatccatctgtttcctttttaacgtctctttttctcctttatactttcgataaataacataaaccaatgtgaaaataattatcccaccaattgagacgattaaccacatgagggaagattcttcagaataagatggatcataggcgtttttaaaatcatcatacatcgtttcaagctgaccagataattctgtatttcgtcctgacgcgtacttttcgataaaagcaatatgagaatcaagacgctgctgagtttcaggaggtaaatcaattgccatcgcaggtcgaatggtgctataactacctagaaaacggtctttacttgctttatatacatctacatctccgtgttcaatagcagtggccatctcatgaattagcggcaaaatctgatcattcgtttgatgccaaatcggctgttcttccgtaactagagcatctactgccaatcgaaattctgttaatgcctggattcgctgatcattcgctttatcgatagatgttacagctttaagtgcacgatcatgtgtatttagtatcaccctaagttccgtattcgaaagttcacttgactgttcaccgggaaaaacagttgaaaattcatccaacattatttttgatcgatcaaactgctcttgctttccaaattccaggacatttgcggctatgtcattccagacttgtttcgaatcggcctgtgaagcgtgtacatttaccgggagcgtgaaaagcaacactaataggagccatcgtctacccattcctgtccctccttcttcctacttcaatgttatgaagaaatggacaagagtagaccatcgaccttattgaatcgagagcttaaaacgttcatttcgaacggctaagaaatacacaatcgtaagtgaaactagggatagccagaatgtaaaatatccgattagtgatgtataatcgcttaagatcgaatatcgcggcatttgaccaaacacataatcaatcacatcattatgtaatgtccaaattgctacagccactagatgccaccgttttatattataaaatggggtaaagagcaatccttcaatcgccatacctaaatgtgaaagaattagcatgattgcaataggagatagttgatttgtttcaaccatcacaagagcattcatgactactgcccagattccatacttaaataacgtaacggcagctaatccttccataagcggccagttcttcttaaaaaggaatgctagtaaaacaaagcaaaagaaaagacttgcggttggactatccggaacaaacaataaaaaaattggttctgtatcagctaattgccatccataccaataataaccgtatattgttccaggtatattgatgagaagcaataaaacgagaaaaggttttgacttaagtaaataaaaaaaatgagaaaccattttgatctcctttattagaggtttaagttgtatcttcaagctaaatcagaaaaaagctgactgcaacagtcagcttttttcattttattgatttgcctcagacgtttcaacaataaagtcagctagcttttcaagttcctcgtcagaacctttaaaggcattcgctggcattccgccgattccgttcacagcaatatccataatggattcttttgtttgctttgtttcaagaagtgatggaccggatccaccttgaagactatcaccgtgacaaccaatacaagattgtcctgaataaatagcatatccttcagcttctttgtctacttcagcttcaacaatttccccttgcttagctgctttctcccagtcatgtgtaacaactgattcccatgttaggtaaaccgttgaaataagaccaagaagcattaacgctgttgctacaggtcgcttagcaggccttctttcaggacctggatcaagccatggagcaagaagaagtgcaccaaatgcaagacctggcataattactgtacctacaagtgtatagtcaccagccgcaaatttgtacttcaagagctggtatagaaagagaaagtaccagtcaggaagcggcgtatacgtggcatcagtagggtccgctacgcgctcaagcggagatggatgggcaattgttaaggcaaggtaacctactaggaaaaccgcacctaccatccactcttttaacaagaagttcggccaaaacgcttctgttttgccggggtactctgaataatcttttggaatgttaggctttctctgcgcagggatacgcgagtcgccaacaaacttcattccttttccgcgatgcatctgtccccctccttcgtataaaaaattgtgtcgtcaattaaatataagttctttagaatacgtcttatagagggccagaaataccctgcttacgaatcatgataaagtgagcagcaagcaatcctaggagtgcagctggtaagaagaatacgtgaatcgcaaagaatcgtgcaagagtttgcgctccgatgatttctccacctgctagaagggtctttgcccattcacctacaacaggaattgttaccgcaatttcaagaccaacttttgtcgcgaatagcgctttcatatcccatggtaagagatatcccgtaaatcctaagcccagcataacaaagaaaatcagtacaccaactacccagttcaattcacggggttttttgtaagagccggtaaagaatacgcgaagggtatgtagaaacatcataacgataacgagactggctccccaatggtgcattcctcttacaatttgtccgaatgctacttcattctgaagatagtatacagactcccaggcgttaacaatgtctggtacataatacatcgttaagaacatcccggataagatttggatcacagtaataaaaaacgttaaaccgccaaaacaataaacaaacgctgaaaagtggtgagccgggttaacgtgctcaggcacttcgtgatctgcaatatcgcgccacatcggcgtaatatctaagcgttcatctacccaatcatagattttatttaacatagattacgccccctaacgtggttcaggttttccgaggtaaagttttccatcttcaactttcttgttgtaaacatcaagcggcgctagtggtggtgtacccggaacgttcacaccatctttcgtataacgccccgcgtgacatgggcagaaaaactgatcaggatatgcaggatttgaagaccagtcaactgtacatccgaggtgtttacaaacaggtgaaagtgcgacaatttcgtctttttcatctttgtaaacccaggcggattgcgttacttcagattcataccaaccatctacctggtcaattttgaattctttacgaactggtttgttcgtaatctcacttgtgtccataacaggtacaaaatcctgcttggctccttcttttaacaatggatcaattgcaaaacgaaccatcggcattagcatccctgctgccataaaaccgccgacaccagtcaggctgtagtttagaaattggcgtcttgttacttccttcttcttcgccattggtttcccccctatcctatgaagtcagtccagccggacataatagtacacacatataactaggacattcctatgatagcgtagtcagtcttgctctgtcaatattcggattggtctttagcatgccacaaatcaactatttatattactttgccacgtatttgttacaaattgtaaaacctgctttacctgagctgagaccgtttccattttgtattgttcatccatgtgttcaagtggaattgccggcatccataataaagcactcgagatctcgtcctccacctgtttccattctacatcagccgttaaggtgataatatgtttaatacctccttcatgcaattcttgctctaactttttcaagcggtccgtcttaatagcttgttcctccgaaattaaataggtataggcaggtagcaaaagaagacgaccttttaattgtctttctagttcatttgatatgattgagatgtactctcccattgatacgattgttttcatactgctcgtcattgatattggaatgagtggaagaacggctgtatctacatactctttttctttttcaaataacgcaatatctgcttcagtccatttcattttgtaaactccttttttgtccatataaacaccaagttgtttggtgagaataaggttctagccacttagcctgctgtattggcaagtcgatccatatggttcttgcttcttctatcgcataagcgttaaccatttcccacatcgctttgctataaagcgttgtttcatttagaacctttacatgtaaatacgaagcacctttctcttctttcatcagtataaatcctcccttatcgttagcaaatagctctacttgctcaagataagtggaagaaagagaaggtaagtatggaagtggataatagatcgagtacggaaaaaacgattgaccactctctttccagtacttttcaatcgtagctttcttattctcgtctgtcactctattaaacggcctagtaacggtttgtcctttgattgaatgtggacttatacgagaagaaacaatttgcgattcaatctgcatctgcaagtgaggcgctaaacagttccctcccgtgttatagtcttctgttgcatagccggcccaggttatagcttggttttcaaatgcctccacctgcaacgtactcattaattctgaagcgatccctttttttcgataattaatatgtgtccgcaatcgacctaagacaggagcttctccttcaaatatcgttaggccagcaataccaacaagcattcctttcttgaaataccctaccattttctcttcttgcattaatttatgtatgatgcggataacgtaatcatcttctatccccgtgggcatctctttaacgagagggatatccttgtattctagggttcgaatcaactctttctctcctttcattaagcctaacgattcaatgtaatttattcgccctccctagtccttgcatttctttctagtataccatctgtttagaaagtgttgaagattttccctagaacgcacgttccaaattgcttaaggcaaacaaaaaacccctgatctatcaggggttataaattactcaattgcttgcttaagtggagaaacgctatttcatcatttcgatccagtgcctcatcaatttgtttcaaaatggactcttttttgaaccgcgtgaatgactcgtcgagaaccatttcagccataaacgaatattttttatcagctgccatattctccggtaaaaatggattctcttctaaaacagccacgtaatgaggagaaacatttttacttttgaagtttagctgaatgtaaataggctcgtcctgattcaggcgaatgtcatgaaaagacttttcagggtctgtcgtaatgatgttgtgtttgtaaaaacgaaaaggcgcgttttctacacagtgcgtggaaatcacaagcgcttttggacaaaattcagcgttctcaacaaaatgaacattccccatcaacacttcatcacttattaaataattcaaaagccagacacattcacgtttcttcacctggtatttctttagaaaccatttcagaaagtcttttttttcaacgacagaaacggagctgctcatagcgattcctccctgagattttcctaatttaacaattcgtcattgaagatacatttccttcttcacctttaatcctctttgaaagtttcctcgtcaaacctcaagatttcttcttcaagatggacgagcgatgggtctagctctagagcaagcttgaaagccttcactgcttcttctcttctaccttcttcaattaggaaggcaccatattcctccagaaaaattggatcctgtctgaaataagtatatgcgttttcatagcgttttatggcatctttatactcttcaacctgtgcataagctgttgccgctgaccaatcaaggtatggatcactttgctctccctcttcaatgtttcgcaagagatccaaaatatcttcatatcgttcctctgtcttcaaataggcggctagcgttttcgcagcttctatatgcgctggattaatggctagtaattcacgtaaatactgttctccgcttgcattatcgtgtgttttaaaggttaacctactagcttgtatatatagctcctcattaaattcatcaaatttaatcccttgagccagtacctcaattgcttcagctatcgcaccttcttcctcataagccttggcaagataaggataaagtgtactatactgcggatctagctcttttagctcattaaacgcattaatggcttttcggtattcattgatttgaagcgccgtaaaaccgtaaccaaacagtgcgttaatttcacgcgcgttctcgagtcccttctcatagtaagtaagcgcatcttcaaattgtccacttccgctcaatgcttcagccaatcgaagttcgatattttcatttgcaagctctcccttggttccaaggactgcttcataataaggaactgcctttagatgatggccttgtgttaaataaaattcaccaagtccaaaatcgatgatcggttcatctggagaaagtcgctttgcctccagcaatttttgctctgcaacttcttccaatccttctgtttggtaaagatcggccattaagagaagtgcaggtggatacgcagcatcgttttcatcaattttatttaaagcagcaatggcatcctgttcttgttcaagatcaacataacattccgctgcctgtacaagtaattcaccttcatttgggtaatgaataagtagctcttctacaacatctctggaatcttcaataagtccaagactgtagtaaatattggatagatcatataagctttcatgatcagcttcttttcgtacttcttttagttctgttaaacctttttcaaaatttcccgactcaattaatgagacagcctgtttaagacgatccacgttccaaaactccttctaacactacttattttatttcgatgactccaagcaaaaactctttttattgcgtcaccctccattttagctgtaaaggatgattctctttcagttattaacgacaaagttctgaaatgaatgggtctcctccatcataatcaagaatttcgtcatcttcaacttcattgcctaaattcgtgaaataagtacgtttagaagcaagaaaattcatcaatcaagatcaatgaaaaaaattccctgtgcagaaagcgtttgttaacgctttcaaaacacagggacaaaatagatatggataggagtggagagaaaccattactatatttagtataacagggaaagtcataaaatcaactgattttttagaaaattttgcgtcttttttaaaatttcagccaactctcctacaaaaaccaaaaagcaggattcctaggaacctgcttttagctgtttcaaatggtcaaagaaatcaggatacgatactttgatagcatcaggtaatgcgagctcgacagcaccttcagttatacagccagcgacagcaagcatcataccgatccgatgatcacctaaacttgaaacttccccaccatgaagtggcgtaggtccttctatcaccatgccgtctggtgtaccagtaatcgatgcccctaaagtttgcaaagcttccacaaccgcgtctatgcggttcgtttcttttacttttaattcttctgcattgcgaataattgtctttccattcgcctgggtagcaaggagcgcaataatcggcaactcatcaattaagcgtggaatgatgtccccttcaatgactgtttcacgaagatcgctcgtacaaatcgtaagatctgctacttcttcttgattgactactcgtctatttttaatcattaatgcagcacccatttgttcaagaacatctaatatgccggaccttgtttcattaatgccaacatttaataaggttattatgctgtttggaacgattgcccccgcaacgaggaaaaaggcagctgaagagatatctcctggtacttcgacattcgtagctgttagctgttgaccgccttcaacactaactgaaagtccttctcttttaacctttacgccgaaactctccagcatattttcagtgtgatttctggagcggtgtgtttcagaaacagtcgtaactccttcagcttgtaaaccagcaagaagaatgcctgatttaacctgagcacttgcaacaggcgactgatatgtaatgcctttcaaatttccacctcggattgagatcggtgcaaatgtaccctgctctcttccatcaatgacagcacccatctgtgataatggaactgttacgcgattcatcggtcgtttagcaattgactcgtctcccgctaaaactgagtgaaatgggcgacctgcaagtaatcccatcattaagcgaaaagtggtacccgaatttcctacatcgagaagctgagaaggttccctgagcccttcaattccttgcccttctacaacaacagatgcgccatcttgttcaatacgaacccccatctgtttaaaacaggaaatggtacttaaacaatctgctccaggaaggaagttcgtaatccgcgttgtgccattagcaattgaaccaaacatgatcgcacggtgggatattgatttatctccaggtatcacgactgttcctttaagactgtgcgctttcgttattgtttccatagttacgttctccttatttatcatctacatatgtttcaaaatcacgatctaagattactttcgcattatcacggtcagtttctgagcgaaagctcactcgaagcacacccataatatcttctcgggtttcaatgattcgaatgtttgtaattgaaatttcttcctttgcgagcttttgcgtaacagcagcgattacaccgggctgatcctgtacatcaaggaacaaatcataaaaggccggtatcgctcctcttgagcgaacgggtaagccatcacggaagtctttcgctcccgaaaaataattaaaaataccgtcctcattctcttctttaatatacccctggatcctatctaattcatacttcatgtcttctgtcatctggagtaaaacatctttgtttcgcaatagaatgtcacgccacatcacaggactagctgatgcgatacgcgtaatgtctcgaaaccctccggctgcaaaccttgcgacgttatagtgctgactattatttcgatcactaacaaaattcacgagacttgcagctaaaatatgcgggaaatgactaattaatccgactaaataatcgtgttccttagcttcaagctcaacaaaagtagcatttgttgaacttaaaaggtccattaaatcgtgtagtttcgatcgatcgacagcatcgtctggcgttaagatataaaacgcattctcaaacaggtgggattttgctgccgtcacgcccgttttgtgggagccagccatcggatgcccaccaataaaggtaacagaagggttcaggatcttcttcgcatgacttacgatcgaaagcttagtactccctacatcagatacgatgacgccatcctttaattttattgaggaaagttgttctagaatttgctccgtttgaacgacaggagctgcaatcatgatatagtctgctttttgcaccgcttcttcaagagaagaagcggtgtgatctacaacacgaagagcttttgcaagatcaagttggttttgattcacatcgaacccagtaatcatggcgtcctgatgccctgctttaattgcgagagcaatcgatccaccgattagtccaagaccgatgattgctacatttttactcatgactgtcccgttctcttttcattaagaaattgcgatagacagcttataatttccttgttttgctcttccgacccgacggttattctcgcagaagttgggaagccgagagcagaaccagagcggacaatgtacccttgcttcatgagatagtcaaatacttcatctgcaggaataccaaaatcgataagaacaaaattcccttgagaaggatacacagataactcatattgctcacaaaaagcatagtaaagagcgcgacctttctcgttttcttctcgacacatctctataaattgctggtctcttagggcagcaattgcagcagcttgtgcgacgcgggaagtattaaacggttctctcgacggttcaattgacgcgatcacttccgggttagctacaccatacccaacgcgcaacgcagctatgccataagctttagaaaacgtacgtaaaacgaccagatttttatatttcgaaagtgcagcaagcgtgtcaggaaaatcagtagcggtcacatattctttgtatgcttcatccattacaacaagcacgtgatctggcactttattcaaaaacgcaaatagctcatcctctggaatgtgttctccagtcggattattaggtgaacaaacccaaatgattcgcgtattctcatcaatagcatgtaacatctcatctaattgatgctttccttcgattaacggaacttcacgaacctcagcatcttcaatgaccgcattatgacggtattgcggaaaagttggtgtagccatcaccgtgttagttcctttttcaagatacgttctgcaaagaatttgaacgacttcatctgagccattaccgaaaacgagctgatcttcatttacattaagatgctttgctacctcagtccggagagaagctgcataaccatctggataaatgtgtaattgcgacaattctttttcaatcgcatctttcacactttgagaagatccatatggattttcatttgaagcaagcttaattacttgtttaagaccaagttctttctttacttcttcaatcggtttacctggcttgtaaggggttaaccctttcatttgtctttttggaatcatgcctgcacctcacgaatggattttcgctttcccatatggagaaatcaaatttcgtacatatgaccgaatttgatcaaccccttctttatgggatgcttcgttcttcaacacttccacttgttcctcaacttgacgaataatggcactaccaacaataacgccatcgcagtgctcttttaacttctcaacttgttcaggagcagatactccaaaacctactgcaactggaatcatactatgctctttcacccgatcgagaaatgtaaatacagaggaatgaaaatcagttctggtacccgtgacaccgagtgatgagacgcaataaagaaatccagtagcttctttcgatatcgcttgcagtcttttatctgaagttgttggcgcaacaagagaaatcagcgcagtctcattagcattgcagctttccctcaactcttcactttcttcaaaaggaagatccggaaccaaaagtccgtcaatatcattttctcgcactaaagcgaagaagcgttcttctcctaattgtaacaaaagattgtaataagtaaatatcacaactggaatttcaagtcctttttctcgcatttgcttcacgagacccatcgccttttcaaggctcataccatgttcaagcgcacgtaatgatgcgcgctgaatgactggaccatctgctaatggatcagaatacgggataccgagttcaatcgcgtttgctccttcttcctgcaacattagtgctaaatcgatggttgtttcttctgttggatcgccagctacaataaatggaataaaaagatccgtccgaccgttcacattttgttcaaatcgcttattcatctccgtcacctccaagatgctccattatcgtatgcacatctttatcgcctctcccagaaagacatacaagaatacgttcttcttgattcatattttgcgcttgtttaatggcttctgagagtgcatgagcactttcaatcgccggaatgatgccttcttcttcagaaagaacttttaaagcatcaagcgcctctgcatccgtgatgcccacatacgttaccctacccgtctcatttaaataggcatgctccggtccaattcccgggtaatcaagaccggcagaaatggagtgaggctcttgaatttgacctgtttcattttgtaaaagataagtaattgaaccatgaatgactccaaggcgtccttcagaaagcgttgcagcgtgttctcctgtatgaattcctttacccgcagcttccacacctattaaatcaacgttatctttaagaaatgggtagaacattcccattgcattactcccaccaccaacacaagcaattactttatcaggtaatccttccatttgttctcgcgattcatcaccaatcacgcgttggaagtctcttaccattttaggataaggatgcggccctacaacagaaccaattaaataaaacgtatcttcaacattagctacccagtaacgaatcgcttcatttgtagcatcttttaatgttcgactacctgaagacactggaacaacttcggcccctagaagcttcattctaaaaacattcaattcctgccttctaatatcctcttctcccataaacactttgcactctaaaccaaaacgcgctgccacggttgctgctgccacaccatgctgtcctgcaccagtctcggctacaattttttctttccccattcgaacagctaaaagtgcctgtccgattgcattgtttaatttatgggcacccgtatgattcaaatcttcacgctttaagtaaatttgtgcaccaccaagtcttttagataaattctcggcatgagtaatcggagtaggtcgccctgaatacttttttaattcatcatggtagtttttcataaactcttgatctgccattgcttcgtttagcgactgttctaattcttctagcgcatacatggctgtttcaggaacatactttccgccgtatctaccatatcttccgcgttgatcaggtacacttgttgacattgttatcccagcctttcgattaggtcgttcattttcgccttgtcttttctatcattcgtttcaattccacttgatacatcaataccatctagttgatagcttaatagttcttgaacattatctaattttacgccacctgcaacaaataaaggaactttttggcttgcggcttcagcttgataagatggaatcgaatcccaatcaaatcgtttgcctgtccccccccattgtcctggtagtttagtgtcaacgacatatccatcaactacaccttcaaaccgcttcatttcttctagagaacatttactatgatggattactttccagatcgtcttacctgtcatttgttttacctttgctacaaatgccggtgtttcactaccgtgaagttggagaacatcaagcggtacttcacttaccgtttgcgctaactcctctaattccgggttcacaaacactcccacaattttcgtatcatttagcggtggatattcatttaaccagactttaacttgttcattcgtaacgcgccgtacgctattggcaaaaataaaccctacatatgggacgccgctcactctcacgctctcccaatcctctaacgaacgattaccgcacagcttaagttcaggcttcctcatgaattttttcaccgaacaaacgcttaattcctttttcataagttccagctctcataagtgcctcaccaactaatacggctttcgcaccggcacttttcacatctttaatatcttcataggttgatattccactttcgctaatcatcaacgtagatgaaggaataaactgactgagtgaatgtgtttgtttagtcgatgtctcaaatgtagcaagatttcggttgttcactccaataatagctggagtgaagtgcgccttaagcgcttcaagctcttccttcgaatgtacctcaactagacattctaaccctaaatttaaagcataatcataaaattcctttgttttctctgcaccaagcgccgttacaatcaataaaatcgcatctgcgccaattcgtttactctcatctatttgtcgtgtatcaatgataaaatcttttcgcaaaatcggcaaagatacgtgcttcttcacttctgttagaaatacgtttttccccataaagaacgactcgtcagttaaaacagaaatcgcatccgcacccgctttttcataagcttttgctacttctacaggatcaaagttggcattgatgatccctttagaaggtgaggccttttttacttctgcaattaaacctacctcatgcgttggtttacgcaggctttcaagaagagaaacgtttgctaatttttcatcttctggcatactaaatcgttccatctcttcgtgctttactttaataatttgctcaagcatgaacattcagctccttgtttgcgcttaatgcatttagttgatcttgacctgttccattcaaaatggcttcttttgccatttgaacaccatccttgatggattcacaagctccagctagataaagagctgctccagcattgtaaagaacaatccccgtactagcttcgtttccttgatcgttaaaaattttctctatcaaatctgcactttcttttgaagtgtttactaccaaatcctttgggttacttgtaacaagtccaacttcttctggggtgcggcgatacgtagtgatttcaccattcctcagttcaacgaaatcagtataagtggaaatagaacactcatcgattccttctccaccagtaacaagtagtgcacgctctgtcccaagacgcttcaatgcttctgccatttccagcgccttttcatgactataaacaccaattaactgagactgactaccagccgggttagctagaggacccaggctattaaagaccgttctaaaaccaatcgccctccgcgcatttactgcgtgtttcattgctacatgatagtttggtgcaaatagaaagcacatgtttttttctttaagggttgcaaccgcttcgtcccggcttgactgagtcgggatgccaagttcgtccaaaacatctgcacttccacttttcgaagacactgctttgttaccgtgttttgcaactttcaccccaagactcgaaacgagaatggcagaagctgtagatatgttaaaggtagagtgcccgtcgcctcctgttccacaagtatcgataagcggaagtccaccatgatctaactgaacaacgtgatttcggagcgagcgaacaaaccctgtcagttcttcaactgattcacctctcatgtgaagaatcgttaaaaagcttgcgatttgtgcatcgtttgctcttcctcccataatgatatccatcacttgttccgcttcagattctgtcagggtatgaccttcaatcattctacttaattgttctttaaacattaagctgctcctcctttttatcaaaaatcgcttcagctacttgtattgctttaatcaaggcgctcgctttatttcgtgtctcttcccattcgttttctggtattgaatcagctacaattcctgctccagcctgtacgtatgctgttccatccttgataaccattgttcgaatcgcgatacatgagtcaatgtttccatcgaaaccgatataaccgatcgcgcctgagtaaatcgatcgtgaagttggttccagctcatttaaaatttgcatcgcccgtactttcggagcaccagacacagttcctgcagggaaggaggctacaacagcatctaaactagtgaattgaggtgctagaactcctgttacttttgatataatgtgcatcacatgagaaaagcgtccaatgtccatcagctgcgggaccgacacactaccatattccgctactcgaccaacatcatttctcgccagatcaacgagcatgtaatgttccgcccgctctttctcgtcttgaagtaattcttctgcaagttcattatcttcttggtcagttctaccgcgctttctcgtaccagctattggatcgatctcaatttccccatcccgaacctgaactaatttctcaggtgagctcccaataatttcaaaatcattcatctttaaataaaacatgtagggagatggattaatgacgcgaaggacccgataaagatccaaccctccaatcgtgacatctttttcaaatcgctgagataatacagcttgaaagacatcaccctcctcaatgtaagattttattttatttacatcatttaaaaattgatgcttttcataattcgattttatttgtgagaaatccacttcgtgagaagtatcttcaggcagtaccatcacttccgattggtttgactttgaagaaagagtgacgagctcttccatcaccgagaaagcattgttgtaaatcttttcaacatccgctccttctcttaatcttgcatggtgacaaaccgtcaaacgctttaaatgatgatcaaaaattagtaaattctcacaaacaatgaaatgaaaaagcggcatatcctcatcccgctctggatgaagtggaattttatcaaattggctaacagcatcatagccgatatagccaacagcgccaccataaaaaggaaattcatgttctggaagcttcgggtttaaatagtcaaacagggcttttacacctgattggaaatcatttcgttgcagaatacctgaaccattggcatcaataacggtaaaaattcctttttgttcaattagcgaataaattggatcgactccaataaaggagtagcgtgaccatttcgactcctgatcactactctctaatagaaaactcgctcgtttaccaatgttttgaaaaatttgaatgggtgtcgccgtatcaagaaaatacgacttcattatcgggatcatgccgaactgtgtggcatccctttgaaaagaagaataatctgtagtcaactttctcacctctccatgttttgttatggagaatggaaacttgagtattgcgaggatgttaatatagtggtataacaaataacagacttaaatcgtctgaatgttagcaataccttaaaagggtatataaaaacccctgaataacctcagggggtgtatagacgtatccctctaagctctcctcaactcaactatcctattctcagctctctcaactcataaaacctattattgcctctgctctaaacttatttctatcctagtatggtgcactcgatttgtcaactcgcaaggtcgggacggagcgatatagctttctctaggtaaacatgcttgatttcatgctgatccattgatgtattcaccgtcattaataatcgaatgcacaaaggcaacgcaccttgaactgggatttcagacgagcatagcaagggaacatttgaccatcctttaaatgcgcggactgcttcagctggaaataccgcatctaagtctctagtcatcgtaaattgaatggatgcaacccgattcggttcaacgtcattttgctctattaattgttctaataacgaagtcgttgcacgaataatttcttccttttcattaagactaaccgttgttgctcctcgaatccctcgaatcaatgagctccactcccttctatactagctcgaagtaatttaagagcgatatcatcgtttaccttcacctttattggttgaccaattctctttaataaaacaagctgcaacgttttgttttctgcttttttatctttcttcattctctcaattaattgactcgcattaagctctttcggaactgttgtagggagcccaatttcttgaaaccatttctctatgtcatccatacgaaatgttgtttgaaaatattcctcactcatacgcagcgcataaatcataccaatagccactgcttctccatgagtcattttgccataccctagctctgcttcaatggcgtgaccaagcgtatgaccaaagtttagatatgcacgaattcctttttcacgctcatcttcttttacaatagcacctttcacagcaataccctttttaataataaattgaagctcttcattgctataatcctgcacaggctttccgctttccattaaccagtttaaaaacgcttcatcatgaataagcgcatgcttaatcacttcactaaaccctgagcgccattcccgatctggtagggttcgcaggcactctgtatcataaataacggctgctggttgatgaaatgcaccaattaagttttttccaagttcatgattaatccctgtcttcccaccaacgcttgaatcatgagcgagtagcgttgtaggaatttgaacaaaatcaatcccccgcatatatgtagcggcagcaaaacctgcaagatctcccacaactccgccgccaagagcaatgatgcatgcttgccgatctaaatcagctttaagtaacgcagtcatcacttcatgataacgggaaaatgatttggattcctcccctgatggaacgacaaacgtttgtatttctttatcctgctgaattgatgataaatatcttccttccaattcttcgtccgtaataatgaagaaacttgagtagggacctttgaccagctcttgccatttgaagcgtatcccagttccgatataaacgggatagcttccaccatttgtatcaatcgatagtgaatccatcattaaaactcccggctatatgccctgtagcgatctagcgcatccgcaatttcttctattcgatcatgtccaaatttatcaagaatcgaacaagcgacttcccacgcaacaacattctcagcaacaacgctagctgccggtactgcacagctgtccgatcgttcaatacttgcctggaaaggctcctttgaatcgatatccacactttgcagtggtttgtatagtgttggtataggtttcataaccccttttacgactataggcattcctgtcgtcatgccgccctcaaagcctccaaggcgattggttttccgcgtgtatccttctgactcagaccattgaatttcgtcgtgaacttcactacccggctttctagcagcctcaaagcctattccaaactcaacacctttaaatgcattaatgctcatgacagctccagcaatttttgcatcaagcttacgatcatagtgaacatgactaccaagtccaacaggtaaaccttctacaatcacttctacaacaccaccgattgaatcaccatttttctttgcatcatcaatcgcttgcatcatcttattacctgcttcttcatcaagacttcggacaggagattcttcagaaacacgcttgatttcttctaaagacatatcgccttcatattgactctcaatgccgccaatcatacgtacatgtcccgcaacctgaataccaagtgagttaagaagtttttttgctacagctcctgcggcaacccttaccgttgtctctctagcggatgaccgttctaaaacatttcgcatatcacgatgattgtatttaatagcgccatttaaatctgcatgtccaggacgtggtcgtgagatttgacgcttcatgttttcttcttgttctttcgttaatggctctgcacccatataatttttccagtgcgtccagtctttattttctacaacaagcgcaatgggagcacccgtcgatttcgcatgtcgaactccgcttaaaatttgaacctgatccttttcaatttgcatacgtcgaccacgcccatatccaagctggcgcctcgcaagttcagtgttaatatcttctgccaatagctcaagaccagaaggaagtccttcaagtattgtcgttagctgtggtccgtgtgattctcctgctgttaagtatctcatctcaatctcctccattatgctttggcgcttttacgtactactatatcacaccatataaaattcgtgtaagtatttttaactttttcaattatggttgggcatatcctaacacaatttaactaaaaaaacacaaaatttttattcttttctctagcagaattgcctcagctgttttatttcgttaatgttgaagatataacctacaacaaggaagtgtctagatggaaatcacaaatctcacagctcaatccatggcagaactaataaaagcaagagagatctcaccagtggaagttgtgcaaagtcatcttaatcgaataaaccgtttgaatcctaaactgaatttatttatcactgtatttgaagaagaagctttagaagaagcaaaagcagctgaaaaagaactaatgaatacaggcacaagaggtcctttgcacggtgtaccaatcgcattaaaagatcttacatcagtagccggtcgtcgtactacctttggttctccactttttaaggaccacattccacaatcagagccgacaattgtaaaaaggattcgaaacgcaggtgctattattattggaaaaacaaatacgccagaattcggccataaaggcacgacagacaatcttttagcaggtccgacaaagaatccatgggacccttctagaactgcaggaggatcaagtggtggatctgctgctgcagtagctagcaagtgcgttccactggcggaaggtagcgatgggggcggttcgatacgcattccctcaagcctaaatggcattattggacttaaaccaacgtttggtcgcgtaccttttgacagctctcctctcaatcgctttggaacgactcagccttttgttcattatggtccaatggcaagatcaacgggtgatgcagctctcctcctctctgtgttggaaggctatcagccaactgatcctttttcggttccagttccagaggaaaatttacttgaggaaatgaaagtaggtgttaaagataaaaggtttgccttcaccgaaaactttggattatatccatttgagaaagaaattttaggaccgctagaagaagcagtaactattttacgtgatcaaggggctatcgtagaaaaaatcccattgcaatttggaatgaaacttgaagaattgatttcattcttcaataaaatgtggtatgcaggtttggcaacggcttacgggtcgctttatgatcgcttcccttcacaatttagcctctctgtttctcgtatgatcgaatccggtagacagcttagcgcagtagaattaagagaaaccgaactgaagcgtacgatcatttggaacacgcttcaacaagaattagatcggtatgacgctattctgtccccagttgtcggagtaactgctttttcacatcaaatcgaaggtcctgatacgataaatggaaaagcagccgccccaatttctgattggatgatgacccagctatataattgtactgggcacccagcgatatcgattccagtaggtacagcgccttcaggcttacccgtaggtctacaggctgcgaccggcaaattcaacgatcgtttattgtttagaattgcctatacacttgaaaaggaaaaaggttttgaatttccaaacatctaattataaccgttcattgattgttacggaatataaaaagaaccagacagatttctgtctggttctttttatatataagcgctttcatttgttcctaaaaaattaaacccacttcgaaacggtttttgtatattcatttaattcattctcattaaaaaacaacgcaatttcacgctctgcactttcaggtgaatccgaaccatggataacattcatacttacttgaacaccgtagtcaccgcgaatggttcctggattagcatcttttggattcgttgcccccatcatcgtacgagcagtagaaatgacattttcaccttcccaaaccattgcgaagacaggacctgatgtaataaagtcaactagctctccgaagaatggacgctctttatgttcaccataatgagtttctgcaaggtcctttgaaaccgtcatcaattttgctcctactaaattaaatcctttattctcaaaacgtgatacaattccaccaatcaaattacgttgaacaccgtcaggctttaccattagaaaagttttctccacaaaaatctcctcactttcaacactttgtatgtatagggcagaaatatttatctgcccttcaaaattctatcaaatattcgcaaaaataacaacatttcctttttaatgttttctcttgccgatatattctgcgatttgtctgagtgacgttcttgctgaggaagggggtagctgttctagttcataaaatgccttttgaaggtagcgatcgctaatctgtcgagaatgttcaataccacctgacaatttcacaatagacagaacttgatccacctgctcttgagaggcatcgacttcttctgaaaaaacattcatgattttctttttttcgtttttctgattcattgcataaaggacaggtaacgtaatgttaccctgtagtaagtctccacccgctggtttcccaagctgttttacagtccctgtataatcaagaatatcatctgttatttggtaagacataccaacgtaataaccaaattgttttaggtgaagctgatcttgtttagatgctcccgctgctactgcacctagctcacatgaggtcgagatcaggagtgctgtcttacgtttaattctacgaaaataatcacgtacattttgatcccaattaaattggtctcgaatctgctcaatttcaccaatgctcatctctagaatggcatgggacaaaatgcgatttgcagccgagtcatttaattcagtcaccagctcaatcgctcgagcaaaaatatagtctcctgtatacatggctacacggttatcccattttgcttttattgttttagctccccgtctcatttcagcgtcatcgataacatcgtcatgcacaagagaagccatatgaataagttcaagcgcaaccgccacgtttttcatgagtggcaaattgtaatttccgaacttacctgaaagcagaacgaaaacaggacggattcgtttccctccagcttttaataggtggtttgatgcatcccgaagaacggggtgatgagcatctaccgtttgctccaattcagtttcaataaatgacaagtctttttttaaagaagcgtatattgtttttaatttcatgagatccacctaactgattttcacaaaatatctgttctcttattcactggtttaaaacctctatgcatagctgcaacaccgccagagtatggctttgtatcaacacggctaaatccgtttttaaagaaaagttgttttaactcttctcttcctggaaacgagctagctgattcctgaagccaagaatattcgtcgtaactttttgcgaacactttaccaagaactggcattacgtgcttgaagtacccgtaataaacttgcttaaagactggaatggtgggctgactcgtctcgaggcagacaacttgtccacccggcttaaccacgcgatacatttctttaataacctggttataatcgggtacgtttcttaatccaaaaccaatagtgacgtagtcaaatgaattgtcttcaaaaggtagattcattgcatttccatgaatgagggtcacgttttctttccttttctcattcactttgacatgaccgacttcaagcatgttttcactaaaatcaagtccgattgctgatccactttctccaacagcatcagccattgcaattgtccagtctgctgtgccacagcaaacatcaagtgctgatgctcctttttgaacatccattagtctcattgtatcttttcgccatgctttatgacgctgaaagctgatgactgaattcattacatcataacgttttgaaatcgtttgaaatacatcatgaacgcgttcttctttagatgaagccatgctttatccctcttccgccattttcttttcctgaatccccttcattccccagttgtattcgaaacgctcctgaaatagctgatggagttctgaatgctgttggagaagttggtccatttccttttttgcataggcaatataagaatcgaggacgatttttgcttttgatgcctggtttgttgataacttcgcaccttttaccgagatgagcgtagaagcaattttttgtaacataaatgtaccagattgaatgattccctgctttctttcagttaaaagacgattcatatagaaatattgtgaaccgaagcttttccaatgtgtaagtccatagtgttcagcaactttgcgtactaaaatggattcaatctctttcaaattatcaaacacgggttcaatcgcactatagtcagtttggtaaaaggacatctttgcttcattaatctcctgaatggcttcagaaagtgtccgaatcagctcattatcttcccatttagaaagaaggtgataatacatgctactaaaataatcacctgcaagtactgtcaactggcgattttttcgatcaccttcgttatcgatctcttcaagtgaaataagatcatgcgtatcaagagctatttgcacaagcatgattgatagaagtgtatcctgtttccttttatgttcgagcttcgcttgttctagcatgccataaaaaacatataacttctcttcatcaatcactggaaagtcgataaatcgaagtaaatatgaatgggataggcgagactgcagcatgtcccgaactcctgctatttttttatgtgtggtttccttcggatttgtcatatcccatacccctaacatgtcttccatttagaaaagtgggctagccgctttttagcgttgaaagcttattttttctttttttcttagtgtgtcgttattcggaatgtatcaattatgtattcaattctagtatagcacaataacccttgagctaaaacgagcggcttctgttttaaaatgaaagaaaagcaggtttcggtttcctgctttactcttctgtacttatttcaccgtgttctgtctgaataacggcttttcctctaaccttaacggcagaagtatgttcagtgaattgggcaatcatcacttctcccttatcaagtttctctgaatgatgaaatcttgtatcagaccctcgtgttaacccaattacgttcacgccattttctaaggctttaataacaaaaaaatcattgctatcgcttttcatatcaatcactccgtttaaaggtttagcctttaatcaacccaagcacttcagctcgtgcagctgtgtcattttcaaacacacctctaactgctgacgttacggttgatgatccaggctttttaacgcctctcatcgtcatacacatatgctcagcttctacaacaaccatcacgccgtgaggttcaagtgtatccaccattgaatttgctattgtcgatgtaattcgctcttgaagttgagggcgctttgtaacagactcgacagctcttgcaagtttactaagtcctgtcactttaccgcctttcggtatgtatgccacatgcgcctttccaaagaaaggaacgagatgatgctcacaagttgaataaaacgggatatctttcactaagacaagctcttcgtgatcttccccaaaaatggtttgaaaatgctcttttggatcttgatgtagcccctgaaagatttcttcgtacattcttgcaacacgttttggagtatctaataatccttcgcggtttggatcttccccaattgcttcaaggatcattgtcactgcttcttgtattttttcatgattaacttcgtacattgttcttactcctccattcagggcctatattacctatgaagattctagcacatggagaaaaagttagcaaaaaagaagagccgcataatgtgcgactcttcttttgccctatgtatttcttacttaactgcatccttaagggctttaccaggtttaaatgcaggaaccttacttgcagcgatttcgatttcttcgccagtttgaggattacgccctttacgagcagaacgctcacggacttcaaagttaccaaaaccaattagttgaactttgtcaccctcttgcaaggattgcataatgttatcaaaaactgagtcaacagcttttgtcgcttcttttttagaaagctctgcagattctgcaacagcattgattagatctgtcttgttcattctgttcacctcctctcaagagagatggataaatacattcattcacttaatgaccgatatttatacgttgcaatgcacgtttagtacgtttgcaagccctatattatacgaagatgcgaaagaattcaatacgtttgtgtcgatttcaacgatttttcagtgtttttttacctattatctgctatattcactatttgtaaacgctctaacgaccactttcttctttatcggttaattcaatcaattccgttaatactttactgaactccttcttttacaccgctcgtagaaactatattaccccttatacaagtaaggttaaacctacaaagcgaaaaatcgactccataaattggagtcgatttcgttatagtataatcgcaattaaaccgcctgatccttcgttaataatgcgctctaacgtctcttttaatttataacgagcattctcaggcattaaaccaagttttgcctgaatcccttctcttacgattgaatttagtgaacgaccgaaaatatcagagttccagatcgaaagtggatcttcttcaaaatcttgcattaaatagcgtacaagctcttcgctttgcttttctgttccgataattggagcaaattcggattctacatctacttttatcatatgaatcgacggcgcaactgcttttaaccttacgccaaatctcgatccctggcgaataatttctggctcatcaagactcatatcttcaatagccggtgctgcaataccatatcccgtctgttttaccatacgaagagcgtcagagacgtggtcatactctgctttagcaaatgcaaactcctgcataagttgaagaagatgatccttgcctcgaatttccacgcccaccacttctttaagaatttgatcataaagatcttctggtgcatacagatcaatttctgctattccttgacccatctcaattccagccaagcgagcatcttgtataaattcaaactcttcaaattgcccaacgacacgatcaacatcgcgaagccgcttaatatctttaactgtttctcttacagattcttcataattttgccttaaccagtgatcctggtgaagaaccattacccaactaggcaggttcacattgacttctaatactggaaattcataaagcacttctctcatcacattgttaatatcatgctctgtcatactctccacacttagtgagataacgggtatgtcatacttattcgaaagatctcctcgtaacgcttctgtttgaggatggtgaggatgcgctgaatttacaatcataataaacggcttgcctacttcttttaattcttcaacgactctttcctctgattcgagatagtcatgtcgtggaatctctccaatagaaccatctgttgtaatcactactccaagagtggaatgctcctgaatcacttttcttgtaccaatttcagctgcttcctgaaacggaataggctcctcataccagggtgtattgatcatacgagggccatcgtcatcttcatacccttttgctccaggtactgcatacccaacgcagtcaacaagtctaacattcacgtctaggccatcttctacatgaatttgaacagcatgattcgggacgaatttaggctctgtcgtcatgatcgttcggcctgcagaactttgtggcagctcatcttgtgcccttgctcgatctgaatcgctttccatattgggcaggacgataagttccatgaactttttaataaacgttgattttcctgttcgaacagaacctacgactccaaggtatatatctccccctgtacgctctgcgatatctttgaagatatctactctctccacgtgatcgcctcctgaattccgcctcattggacgaaatgattcactccagaccgcagacattcttgaacactaccattctatgatgttgtccaataaatatgacaccttaaagcaaaaggatttgatgtaacaagtaaaccttcgctaccataccgtttaaattcataaaaaaatccctcctctttttaatagttgtattgctaaagagaagggaaaatacctatttcactaaaaaaacagctttatcattttcaaccgtatacggaacagatgcaactggtacataaaacgaattgttcgctaacaaatcacggatgtcatcaccgttttggtagttatggtcgggattactttcaatcgcttttgtaaggtcgcttgagtaatcgatatgtacattaccattttggtcaagaaaaaacggaagttgatcgtttgtaaacgggctctttaccgttatctcttcatcaatacccatcgcctcgtaatcgattgaataacgatctttctcaagtacttctttaaaaggaggaaagtctttttttctgcgataatcattaatacgcagctgcagatcttttaccttttcaatcattactaaatcgattaaccttactgtagggttatcttccacgttaataagaacgtattgaaatacccctccattttcaaacgaattccccggtgcttgctgtaaaaaagcgggtactaatttcttgaaatcaattgggtacttttgatagattggcgtttcctgatctctcgttttgattggaagaactgacttgttatcctgatattgttcaacagctgtttgaacagattgtatttgatctgtatatggaatctgattctcgtttttctggctttcaggatacaaacaacctgaaagcatagtcacaatactcgtccataatacaagctttgtagctaatcgtttcatttcactcattccttaatcaaagtttacttgcttaatttgtagggccagtgaccacgacaagaagcatcaggacacccgcaacgaacatacatatataggcaaaagtcgatacaagtattcgaaaaaaacctttcagcttcgagcggcttagcataatggccataacagcaataaacattaagccaagtgcagaaagcgctacccacattttaattaacgctggtgacattatttatccccctagtatgaaaatctaacttacactgccaatcattatatcaaaccttatccctttttacctatagtggttttaacatttaaaacaacagattcgataacgcttccaaacccacaaataaaaagctgaagaaaggggcttttcttcagctttgactatatggatttcttatagaagtatgcttttgcacattgatggttccttaatagtatatggtctttcatcgaaggcggtatcgttgattagcctaagtttcatcatttttttatttttgactaaaaagttttgcaattgcagacaaatcgaacggcatattcttgttgacgatcgcctttacgattcgatcttctttttcttttgacacaggtacattagcaacgcgtgcaacattcgcaattaatctacgcactgttttctcatcagtaaaatctgcgccctgaacggaatttgctaacttaaagatgtcttcttttttgacatttgttttcttttctatgttatcgaacagatcgctcacgctgtttcctccttaccattaaggttcaacatagtgtatgcaaggaggaatacttcgtgcttcgcctgcttatagttctttaggatttaattcaaaacgatcagcaagtaatgaagtaagatcttctgtttcatgggtacgaagtcgtcccattaattgatctaccccatctttaggatctttgttattgaatagcacctcaaataacacggatgtaattggcatttccacgttctgtttttttgcaaggtaatatgccgcttttgtcgtccggacgccttctacgaccatacccatatcttcgagaacttcatcaagattgttccctttacctaacagattaccagctcgccagttacggctatgtacacttgtacacgttacgacaaggtctcctatacctgttaaccccataaaagtaagcggatttgcccccatcgctgccccaaggcgcgcaatttcagctaagcctcttgtaatcagagcagcttttgcattgtcgccatatccaagtccatcagacaaaccagcaccaagcgcaatgatattttttaaagctccccccagttcaacgccaataatgtcatgattggtatatactcggaaattcgagttaataaaaagatcctgcacatattcagcttgagccatggatttagaagatgaagtaacagttgttgggtgacgaaggctaacttcttctgcatgactaggccccgataaaacaacaacagattttcttaagtcttctgggatttcttcttcaattacctcagatattcgcttggatgtttcaggttctattcctttactagcatgaatgaaagtaacgggagtagataagtacgttttaagctctgggagcacttgtcgaagcgctttagtaggtgtaacaagcaaaatagcttcagcacctttaacactttcttcaagtgaacttgtcgctctaatcccttcaggaaggctaataccgggaagatatttatcattcgtgtggttctcattaacttcctctgcaagatctgatcttcttgcccataatgttacatcatgttgattatctgctagcacaattgcgagggctgtcccccagctccctgcacctacaactgaaattttcgccattgaacttcctcctcactgctcgaccttttgaccgagcttgctttcagtaccagtgaacaaccgtttcacatttgtacgatgtcgccacactgaaagaatcgctagaatcgtccctaacaaaatataagatgttggatttcctcctagcaagaatataaatgcaggcgttagtacaacaaaaattagtgaaccaagtgaaacaaatcgcgtaatcacaatcgcaaaaattgctataatcccagcataaagtgctggtaagaacgcaattgtagcaaataccccaatcgttgttgccacaccttttccgccccgaaacccaaaaaatatcggccagttatgacctaaaatcgcacttattcctgcaaggaaaggaacgattggttcactagagaaccaataccctaaccatacagcaagtatgcctttaatcacatcaagagcaaggacagcaatagcaggacctgtcccgagcactcgaagtgtatttgtcgctcctgcattgccgctcccgtgatctcttatatcgatcttcttcacgaattttgcaattaaataactgaaactaattgaaccgagcaagtacgcagcaatgcaaatcaggatcgcgatcatctcatttcccccttttagttagcaaggtcccccgaacgaaacaaggttagttattcgctttttcttcgagcaagaatacgtaatggcgtgcccttaaagccaaacgtctcacgtatacggttctctaagaagcgtttgtaagagaagtgaagtaattctgggtcattaacaaataaaacgatagtaggcggcttcacagccacttgcgtcgcatagttaattttcagtcgtttcccattatccgtcggtgttgggttcatcgcaactgaatccataattaattcattcaatacatttgttttcacacgtaatgcatggttctcggctactgtgttcacaacaggtagtaacgtgtgaagacgctgtttcgttttcgcagacaagaacacaatcggtgcatagctaaggaacaagaaatgatcgcggattttttgttcgaattcacgcatcgtcttatcgtctttttcaacagcatcccatttgttaacaacgataactacggctttaccagcttcatgagcatagcctgctactttcttatcctgctcgatgatcccttcttctccatcaataacgactaaaacaacgtctgaacgttcaatcccacgcatggctcgaagaacgctgtacttctcagtcgtctcataaatctttcctcgttttctcattcctgccgtatcaatgatgacatagtcttgaccatcgcgcgtaaacatcgaatcaatggcgtcacgggtcgttccagctatatcacttacaatcacacgttcttccccaaggattgtattaacaagggaggatttccctacgtttggacggccgattaatgagaacttaatcgttccttcatcatattcttcctcatgttcttctgggaaagacttaaacacttcatctagaagatcgccaagtccgagaccatgagaacctgaaataccgaatggagtgccaaatcctagagcatagaaatcataaataagcgtttgttgttctgggttatctactttatttacagctaatacaactggtttattagaacgataaagaatttttgcaacttcttcatccgcatttgagatcccatctcgtccatttaccataaatataataacgtcagcttcgtcaatggctatttctgcctggtaacgaatttgtgaaagaaacggctcgtcgcctatctcaataccacctgtatcgatgatattaaattcacgatttaaccattctcctgtactataaattcggtctcttgttactcccggagtatcttctacaatcgatactctttctcctactatacgattaaaaatggtcgattttccaacattcggtcgacctactattgcgacaactggttttgtcattttatgcacgccctttctaaaagactatctaagcttgaaaccagaaagtcgtggacaaactttccaggagttcatgataaaaaccctcctctataagaagggcgtagtcttcgatagcttttatatcttatcaaaaaagcaaccattgaacaacagacgatcaaatgaatcttctttcaacccctcctaaactttgctaatgctttacaattatatacacgccattacttaacttgtgcgcaatcccatctaggatggcttcaagatcagctgctactccgtccatttcttcttcagagtcacatacaaagatattagctccaacaggggcttttgctactgatcgcgtgacagttgccagtattgctttttctattttcaagactcgtcactcccctttttcttcgtttcagtaggcatacgtatggcgttttcaagcgtcggaacttgtgaaataactttcatagcaagatcaacatttttattttgaggtaaaatgaaaactccaatacgtccatcatcaagatcgcgtttaattaatggcacaagggctggagtaccagaatcacgatagacgccgagtgaaatggcaaggtcatgaagaatcgcttgtctttgaccaagattaccaatagtcatccgcgcatcaaaatttttcggagaaattgtaaaaccaagtccatgttgtaaaatctcttgctgccttgctggaatcccaatattcataatgtaaatgttatcaacatatagtcctgcaccttcaaatgtcacttctttttgttcaatgttcgcaatcttccctaacttacttccagtcatatactttcttgctactaaaaacgcaagaaaagctgctactaatcctgaccataagtttatagctaagtaggcaaatgatgtgacaaaggaaataaagatgactaagtagtttctaccttcaaacgtaacggcaataccctcaatgtacgaagctcctctcggaacgagttcgagcgaatccatttcagttagggtttttctttccatattgcgcacttctcgaaattgcgaggccgcaagtgttaaaaaggtaacggccgtaaattcttgttccataatggaaggaacaacgagtgagccaagtgatgcggcaataaatccaagggcaaggtggatgatcatcccatgtgggtatgtagggtattggcgataatcagtcctgaacatataaattctcgcaagtgtacccgcgatcaccccaaacaaaattgaaattgtatactcattcatgaatatccccgtctttcttgatgttttttcaagagtttttcaagttgaagcgttacttttacaaatcctgaccataccgttgtgctcattactgaaatagccagtatgtccagcgaggctaactctccaataactcgttcaaatcccatcccattaaatatcattcctaaaatcatttcaccgtggacgatactaagaattagaaaagagcagcgttcgaacgtaccgttaatcgttaaatgaatgatgacaagaagaattgctgaaatcgaccatcttgtatacaagaaagtaaataccggatcataaattgcaaacagctgaatcgctgtaaatgcggctgttaacatgatcagaataatcattgcgtaaacagtgttaacacgatatttcaataaaaggaaatacccacaacccagtaaaagcagccataaagctgataccgtaacattgaatgtttctactgttgtatgaattaagcaaattgctagcaaaaaaacaaatgctaacagcgtgcgattgaaggaagctttttgaaaaaaaacggcaataatcagtcccatccacgcgaaccaaacgaatataatcccatccaccatttctcctcctctcagtatgatcagtatgggatgttttcataatagatagacttaaaaatgcataacttctaaacctttttttcattataagaagaggttcgtttgaaaggaggataaaaaaatgggaaaagatcgacaggaaaaaaagttaaaaaactcaaaacgagtggagtcagatcgtgatcaatctcttgaacatcaaggagcagctatgttagaaggagcttcagttgctagaaagcgaaatggtcagaagggataagccttcaaattttgcacacaaaaaagctctctgcattatgatgcagagagctttttaatttcgttatttgtatttctttagctgatcaccgatcatatctccgagagaaaatggagcgtttccatcactctctttttgatattcttcaacttcgcttgatacttgttctgtctctagaactttaatacttaatgaaattcgcttttcatcgagattaacatcaagcactttcactcgaactgtttccccctccgaaaggacttcctgaggcgtaccaatatgtttgttcgagatttctgaaatgtgaacaagtccttcaacgccaggagctacttcaacaaatgcgccaaagctaactaaacgttttacagtaccttcaatttcatctccagtactaagcttgcccttcacttcttcccacggtcctgggagtgtttcttttatggatagtgaaattctttcgttgtcacgatcaacagagagaattttaacattcacttgctgaccttctgttacaacttcagacggtgtttccactcgatggtgagccatctgagagatatgaactagtccatcaactccaccgatatcgacaaatgcgccaaaatcagttaatcgttgaaccgttccctctacaacttgtccagtttgaagagatgcaagcgtttcttgttttttatgatccgcttcttgttcaagaacagcgcgatgtgatagaatcactttcgctttctctggatcaaattcaacaattttcacactcaggcttttacctttgtagtctgagaaatcttcaacgtagtgtctttctacaagggaagcgggaataaatccacgaacaccaagatcaactacaagaccacccttaaccacgtctgcaatttcaacatcgaatgccacagaattttcatacttctcctgcagggcatcccatgcctgatcagcttcgactgctttcttagaaagcactagttcatcttcagaaactttgattactttaacttctatttcatcaccttctgagagcacgtcgctaaccttttcgacgtgaaggcttgacagttcgctgattggcagcactccatcaactttaaaaccaacatcaactgatgcgtgtttttcttcgactttggagattttcccagtcaccacatctccaatttcgaatgatttgaactcagtcatttcctgattcatctcttcacccattgacaaactcctccttcaatccaaaagaaataaaacttttcgatatgatttataaaagtcttccacttatagcgaaagaaatttattgaaaagttaagcaccctttcctctaactttcactaaaaatgacggatttgtcaagtatcccgacacatttatttaaattttttaacaatattgaattatttatggtgaatttcaatcaaatcttggatttctttcatgattgcctgcgtcgctttttttgctgcaccctgttcttcacgtaataaagaaaggtcgacaggttttccatatacaattttcaagcgaccaaatggtttataggagccctgaatcgcgcaagggacaactcttacttcgggacgaagtgcaaaaaaacctgctccagataaaccctcgcctagctttccatctttgcttcttgttccttcaggaaataaaccaacaacgccaccatcttttagaattttcattccgcttctaagagcttgtttatcactcatgcctctttttactgggaaagcgccaaccttgtgaatcaacttcccaagaaccggaatagagaacaattctgatttggccatgaaatgtacatctctcgggaacatcgaacccactaatggtggatcaagattgttaatatgatttgaacaaaggagaatccccttatctttcggaacgttttctcttccaacaactgtaactcgattgaatagcttaaaataaacgtgaaataagcccttcccgacaccgtataaactcacgtcatcatgccctttctttcgctaattgtaaaatatgatccacaacatctgagatcgtcatggtggtcgtatcaatttcaatagcatcgcttgcttttacgagaggggctacttctcgctcagtatcacgcttatctcttaatgcaatttcatcttttatctgatcataatttgcttcgatcccattttcaattagctctttgtagcgacgtgaagctctttcttctactgaagcacttaagaatactttaagttcagacttcggaagaacgtgtgtaccgatatcacgaccatccatcacgacgccacctcgttctgcgagtaatttttgccgcttcaccatttcttctcgtacttcactttgtcttgcaacgaatgaaacattgtttgttacgtgagaagatcgaatatccgttgtaacatcccgatggtcaatcaatacaagttgctcactttcaccaacttgaagatcgattatcgtagtatctaataaagatttaagcgcagggccgtcttctaaatcaacatctttttcaatagctttaaaggttaaagcacggtacatcgcacctgtatcaatgtaaagaaatgttaaatggtcggctactcttcttgctacagtacttttaccagctccagcaggtccgtcaattgctatatttattcgtttgttcatattcttcttgcctccaaattccgttcaatcctattaaatcatctaattgacaacttaacgtacaaaaaaagcagggtatcctgctttctttgtacgaccaaaatgtcatatttatcataacataagacattttatcggtctattcactattggcgcttgatcagaggaggcaaatccttcaatacaccttcataataaatggctttgctaagataaattcgaaagtcctcctgagtcagtaacaactgagaggccataagaaaaataaattgaatgacgatcagtttaattaacatttgttcaagtttcgccattccatcaccccacttatgccgtttcgtaattcatctcagttccgtccattttttcaactctttcttctcgtccattttcaacattaataaaaattcgatacgtttcattttcaatcgtacccataaattcataacataatacttcttctccaaggtcattttgtatgacgcccaacccttcgtccatcacttgaacattggggttaacttgatctaatgcttcgtttcttgataatgttggcgtcttgagttgtctttcatgatgattcgttaaatactctagcgattcgtatccagtaatatcaccattgtctaacgccactttaatatgaacagcgtcaggatagatcgcaacatcatcttgttggtatacaaatgtaaagacgcccatgcgatcatactgcctactttccgaaatggtcatatttgtgatgtcatgttcttttaagaaagcccttgcctgatctgctgcttgattcaagctaagcttttgttccccgatttccctatccattaggatccagatcggttttgcaccctttttagtaacatcaagatttgttgacgattttttgtctttgttctcaattgaaagactataggcttgatattttgactcatcccccgttgtagttatgtctattttggctttcgaatcaagatctagaaaatcaatcacttgttgtttggcttcttgttcactaagtttcttccctttaatatttttatctagattctctttctttgtattaagctgagtcacttcaggtccccagttcacttcactatacccttctacttgcttatccactgtcttaaatccatctatgattgtattgtcttgaggctgggattcggaagctagagcaagctctacgtccatccagcggagattatgatcgattaccatcgcttgaacttttcttaattcatttttgatatctgtggagtggctgtgcaaattcttcagcgtctcatattcttcatctgttaaagggttttcatcgagatctcgaacagctactcggtaactaaatgagccgatattcgttaaaaactcctctgtcttgttaaaaggcataagtgttaaaggaagctgtcccacgtcattctgagcttctgaagttaagcgccacacttctgctaacgcaggcgaaagactaccacgagagttcattgctagcgtagatccaatcttctcttctagtgcatccatgtgaaaactcaaatcatgaaatgctcgttgatacgtattttcagcattaataagtactgcatttttctcctggtgttctttgtatccccaataacttgttccggcaacgccaactgcaagtacaccaatcaatattgagcgaatcaattaaaccacctccattattcacagaatatgtgtttcccaatttgtttgatttgcggccttgtccatatccatccggacgtagctgtattcggattaaaataataaagcgcttctcccgttggatcccaaccgtttatcgcatcgatgacagcttcttttgccttttcgttcggcgttaaccaaatttgtccatctgaaacagctgtaaaagcacgcggttcaaaaataacgcctgatacagtgttagggaatgatgcgctttggacgcggtttaaaattactgcagcaaccgcaacctggccttcatatggttctccacgtgcttctccataaactgcatttgcaagaagcttaatatcattctgggaatatcctgaaggaacattcttcgcctgtacattcgagtcttttggcttactttggttcgtttctgatgcttcaggacttttgcccccctgtccagggtcatattttgtggttttatttaactttgccttcatctctggtccaacgagcccatcaacatccattccaaattcgtattgatagtttctaactgcccaatacgttccccaaccaaaaaccccatcaacattacctgtataaaagccaatatgcttcaaacgtgcttgaagttcaataacgtctgttcctgtcgctcccttttgaataacttggtttgaaaatgcacctgcttcattgtcatcatctaaaaccatgataagcggtgcacaaattaatccgattaccaaagggattttcagaaaattaaatgcctttctcatgctgtgaacctccctgatcattctgatttcacacgtgtagtttttgtaacgataggtattttatacaaatgaaacgaatgacttaggatttttgtcaattgcctttctcggtttttgcatgatgtggatttactacaaaaaaagatgcccagtgggcaccttcgctagattggcatattttctttcgtttgcattaattctgcctggttgagatcggcggcttttattttccttaatccaataaaccacaggataagcataaagggaatcattaaatagatcgtattactgtttacttgaagaaccaaaaaattatacgtaccatgaaaaataaacggtatgaataaagaaagggcaatccattttccaatcttattctgcagcgaaaatttccctctacctaaatatgaacccatgatcaagccaaataaagcgtgactcgatactggcaaaagcgccctccaccatgcttcctgaattccataggcaaacaggtaaaatacattctcaacggatgcaaacccaagtgaaattgccacgccatagacaatcccatcataaaaatcactaaattctatatggatataaacggtaaaataaaatataaaccactttaaaaattcttccaacaaccccgacattaaaaatgactgactgaatggtgactgcaaaaaattctccacttcaaatccgtgctggataaccataactggaaacacaagcatggccccaaatacaaaacttctaacaactgggccaattggctcagattcatactgatgctgtttaagataaaaaaaacaaagaagcgcaatgcctggtgctattccagcagttatggctgctaacataggctttccccatttctatcccatacctcttataaaagcagattcactcttacctatacttttataatcgtatcatgttactttatttaaggaaacattaattaggaaaataatgaggtgatgctatgagtaaattattgattattcataccggaggaaccattgcaatggaagaaaacaaggattctggtgctgttagtcctggcaaagaaaatccgttaaacgcaacgcttaaccaacttttaacgggtgatgatgttttaattgatgattatatcaacatcccctcacctcacatgacgcccgaaactatgtttgctattgcagagagaattgaaacaagaataaaggaagagcctatacgaggcgtggtcattacacacggtactgatacacttgaagaaacggcttatcttttagatcttgtgcttcaaacagatcttcctgtcgtcgtcacaggcgcaatgcgatcaagtaacgagcttggatctgatgggccctataacttactttcttcaatcaaagtagcatcctgtcacgaagcaaagggaaagggagttctagttgtcctaaacgatgaaatacatactgcaaaaaacgtaaccaaaacccatacgagcaatgtatccactttccaaagtccccagtatggaccaatcgggattgtaacgaagcaaagagtgttctttcaccacacattaacgatgagagatcgctatcacatatccggattaacgaaaaaagttatgcttttaaaggcttatgccggaatggattcgaaattactaatagctgctgctgaacttggcattgacggtatcgtgatagaggctctgggacaggggaatttgcctcctgagatgatggatgggattaatcatctaagagcaaaaggaatcgcaatcgtgatggtttctcgctgttttaacggcatcgttcaagatgtatacggatatacgggcggtgggaagcacttgaaggaacaaggcgtaatcttctcaaacggcttgaatgggcaaaaagcccgcttgaaattactagttacgcttgaagcgactggtgatccaaaggaattgcatagcttcttcctaagataaactttccctaccgcttatctatacaaaaaaacctaccttatggtcttacccctgtcaagtagacagtataaaaaaactacgctgccaacgcgtgtcgatattcaatcggcgcgcgttgctttaatttcttctggaaacgtctgtagttatagtggtagatgtaatcctcgattgcttgtctgatctcgttttctgttttacactgattgatgtacaacttctctgttttgagatgcgaaaagaaggactcaatgcaggcattatccaggcagtttcctttgcgagagtggctgcccttaacgccgtattcttctattcgtgtgttgtatgccttagacgtatactgaaagccttgatccgaatggagaacggctttcgttacgtcttttttctttgtccattgggcaactgtatctagtacaagcgctaaatcgttgcgtttagaaagcttccagcttacgatctcattgttgaataaatcttgaatcacggataagtaataaaatcgtttaccatctgatacataagtaatgtccgtcaccattttctgattcgttccatttgctttaaagtttcgttttagcctatttggattgatcacagacggagtgtatccatgccttttcctctttttacgaatcaccgattgaatgcccatctcgctcatcaatcgatacacctttttgtggttgatgtggtaaccactttctttcaataaacgcgtcatagtagggtaacctgtttccggatgaagaaaatgaatccccatcatatgcatttggatgtcatgatcttgattggccctttcttcgcgctttactttactagatctccatttgtaatagcttgatggttggagggaagcaatctctaacaaccaggtaacaggagctttattccttaaatcttccacggtttcatactttattttttgcgtgattttccctccttttcgagattttgatactgcttttttaagtaatccacctgcgctttcaggtaatctctctcttcttcaattgttttaaagtttgtgcgtggcctaccatgcataggattttcctcactgcgacttcgaatatcaaacggctcaccgtttttccacttcctcacccagactttcagctgtgtactattttttattcctaattcttccgctaaagcattgtaactttgagaaccattaatgtatttcatcacggcgttctgtttaaactcgtctgtatacgtctcaaacctctgcccttttttagccatagaaaaaatcccctccaagcatcattctttcctccaccatatcatggaggtttttttgaatgtctacttaaaagggataatatcattagtcggtaggtttttttgctttctttatcactgaattggcaatcatcgcaccgtgtaaccttccattttcaatgaaaatttcatttgcattgttcccagctgcaatcacacctgcaatgtagcaattttctacatttgtctccattgtatccgcattgaacgtagggcgaccgctttgttgatcaatctgtatgccgatttttgtaaggaaagaatgatcgggatgatagccggtcatcgcgaaaacaaaatcattggggatggttttttgttctcccaacacttcatacacaatttctttttcccttacttcaactaaggaagcgttaaactccattgaaactttattgtttctaacgagggcttcaaactcaggcagaatccacggtttcacactcttagaatattccgaacctctataaagaatggttactcgtgctcccgctttttcaagttccagagcggcatctactgcagagtttttcccaccgatgaccgcaacgtcctgatcaaaatagggatgtggctctttaaaataatgcagtactttatcaagattttccccttcgatgtccatataatttggactatcataataaccagtagcgattattaaatgctcagcacgataggtgatttttttagattcatgtactttttccgtttcgatgataaaggcgtcattttcctttgtaatgacgtttgctttttcgaaggaatgaattcttaactcctttcgcttagccacgtctcgataataagccagagcctggtttcgcttcggtttacgttcttcaataataaaaggtacttctcctatttcaagtttctcacttgaactaaaaaaagtttggtgcgtgggataatgataaatggcgttaacgatatttcctttttcaataattaaagggtcatatcctttattcattaattctatggctgcagacatgccacaaggtcctgcaccaataatgacgatctgttcttctctcatttctctcactcccgaaccactccataagaattagaccatttctttattattattctactcagtacaataaaaaaattccctacctgaatgatagggaattttattcggaaaggcaactatttatatccatcctctaaaacgagatgcctcagccattttcctcacgccaaccatataagcagaaagcctcatatcgactcggcgcgtctctgccgttcgatagatcgaattaaatgcgttaaccatcactttttcaagctttgcttccacttcttcttctgtccaataataaccttgattgttttgaacccattcaaaataagaaacggttacgccaccggaactagccaacacgtctggaacaagtagaatgcctctgtcagttagaatctttgtcgcctcaattgtagttggtccatttgcggcctcaacaacaatgctcgctttaatttggtgagcattctcttcagtaatctgattttcaattgctgccggaacgagaatatcacaatcaagctcaagtagttcttggttactaattgtttctttaaagagcttcgttactgtaccaaagctatcacgacggtcgagtaagtaatcgatatctaggccttcaggatcatgtagggcgccatacgcatctgatataccaacaattttcgctccagcatcgtgcataaactttgcaagaaagctacctgcatttccaaatccctgaataactactcgtgcaccttctattttgatatcttttttcttagcagcttcacgaatacaaatcgtgacaccttttgcagttgctgattcacgaccgtgagatccacctagtactaatggcttaccagtaataaatcctggggaatcaaattctcttatgcgactatactcatccatcatccatgccataatttgagagtttgtaaaaacatctggagcagggatatctttcgttggcccaactatttgactaatcgcccttacataaccacggctcaaacgctctaattctctgaaagacatttctcttggatcacagataatgccccccttaccgccaccatatggaagatccacaatccctgcttttaaactcatccagaccgaaagagcttttacttcagtttcagtaacatctggatggaaacgaacgccacctttagtaggtccgacagaatcattgtgctgagcacgatacccggtaaatattttaatagagccatcatccatccgaattggaatccgaaccgtcattaatctcattggttctttcaataattcatacacttcactcggatagcctagtttgtccagcgcttcgtgaatgaccgattgcgtcgactctaatacgttccgtttcttattgtttccttgtccgttgtctgtttcgtttttgtcgaccattgctatacctcccattactatgcacttactctgctgttttcatttagcttagaaatctaacctattccaatttaattaaaacgtcttatgttgtttatagaatgttctattgctctgctttcaaaacatagtatacacgtttaagtaagctatgagaaggcattcataccacatttatgcaaattgttccacactgttgaaaacgcttacgataagcagtggtagtctttagcaattaaaagtaagaccccacttgtgtgaggtctcgcataactatttctttaagcctaactgaattaagttttcaatcatttgctcataagagtaaccaatttctttcgctgcatctgggaataaactagttggagtcattccaggtagagtgttcacttcaagaaacaccggttcagatccatctttaggtacgatataatctacacgtgaatacgtatcgcatccaagtaattcgtgtgcaacaacagattgtttttgaataagttctgtatagatttcagaaatacgagcaggaacgatgtgttcacttccaccttctgcgtatttcgattcatagtcgtagtaagcgttctttggaacaatttccacaacgggaagtggttttatttctctctttgatcccatcacagcaactgttacttcagtcccagaaataaactcttctagaattactgtatcatcaaatcgaaacgcttcttcaatccctttttgaagctcctcttccgatttagcaatggttaatccaatcgtcgacccctcgctgtttggctttaccacaactggataaccaaatggtaaatttagtgaatgatgatcgtctgacttatggagaacatgatcctgtgctaggcgaatccccgaatcctttaatacttttttgcttttagctttatccattgcaacggctgatcctagaacaccagatccgacatatgggatttgcagcatatcaaggagtccttgaattcttccatcttctccatacttaccgtgaaggccaataaaaataatatcaacctcaagttccatcacttctgataatcgttctggatgaaagtcaataccgatcacttcatgaccgttttcttttaaagctttcatgatccctttaccgctagatagcgaaacttctctttcagcagaagttcctccataaagtactccaactttcataagctatacctcctgggctacatttatgtatgtcattatattcgattgttaatcgagtggaacttaacaaaacttctctcatcataccatgtttttcgacagctatgttatcctgagtgaccatcgttaggtattattattggaaaaaagatgatcatcttttgtatacttgccataatcttatatatgaaaggaaatgtccttatgtctcgtacatttatgtttgttttcgctcaccctgacgatgaaagctttacttgtggggggacgctaatcgaattagctaaagcaaaagatacaaaaaccattttatacagtgccacacctggcgatgcaggcaagtgtggagaaccacctctttgtcaagcagatgagctggctgaagttagaaaaaaagaactagaagaagcttctaagctactcgggattgatgaactccatattggcgattatcaagacgggaaattaaatcagcttcctcataatgagcttaagaacgatgtgttaaaacgaattgaatctgttcaacctgatgttgtcatcacgttcccgccacatggtttatcaggtcacccagaccataaagcgattcagcttgcaacgcttcaagctgtaaaagaaacaaacgtcgtaaaagagctgtattacgctactttccctcaatcattagctgatgaaacaggaaatccagcttatgcagatccagatgactcaatcactttgatcaaatccttctcaaacgaggatttagattcagttagaaaagcactattggctcatcgtacacagcatctgtccgttgaacgagtttttccgacaatttataaagaaaatggatttatgaaatttaacaataaagaatattttatcaaagcatggaataacccaagctatacgtctagttctatccttgattaactaacaaaacctcccaaatgggaggttttgctagttaaaataatgatttaactgttcaatcgctgttgatcgcataatttgcttcccatactccattacccgatagcttgtaatcgttgaagggtttccgaattcagcaagcaacgcaactaaagaatctaattcatactcagcaaattcctcttcatcaaatttaagataaaattgagattggaaggaatagagagtaccacctaaaattccaacgttgattaaccttttagaaagaccaatcacatcctcaaaggaacgaaactcataaaatacttcatcgctttcatcgagcgtaacctgcatttcaatgtattcgtcattgtaatcatcttcaaaatcattttctgccgaacccttcgtaacaataacaaccattccttgagcaggaagtgagaacacttctacagcaattggcccatcgactttaaagccaagttcatcgtcagcttccattatcatctcacgaaatagcctgtgaactttcggtacgtcctgccatagctcttcttttgtaattccacgttcatttaaatcatcataagttagaaaaatctttattttatcgtacgctaaacgttcaagacgcatctatttcccccctaccgtctgtcacccgcaaatcctttattcatactatatgtgataatacaaagatggttcttggttgacgatattcttctagtttacactgtaaaaggaagcttagacaagtcatgtcaactatccatttaagtagtcagcttttgaattttatctttgatccaaacatcccattcctctttgctatttccaacgaaaaaggagtcataggcctgtctcttttcaccacgtaaatgcccaatggccgccccacctacaccgattgttaaacccgagaaacgctgatcaaggcgatcaacgaggtcaaggcatcttggtaagtttgccattaacgtacatgataaaaataacattttcggatctgtatcttccacaaccgtctcaatatcatcctcaggtatgcttgatcctagataaatgacttcaaacccttttctccttaagtaaagagtgaaaatcaacaaaccaagttcatggtattctcctgacgagcaaaccgccatcactttcggaagataaccatcaacaggaagagtgtgaaatatcatcccaattcttgatcgtagaaaagcacttgtaaaatgttcatgtgcaatcgtaattttttcattttcccaaagatctcctaccctaactaatagctgggcaaggatgtcatgtactaccttatcaatgctaaacactgaaaacgcctgattcaataaatcctgagctttattctcgtcgaaagcaagtagcgcttctaatatttcatcagctagtatatgagctcgatctctttccatgtcaattcccatactatctgtatctgttgaatcattcccattttcaagcaattctacagcttgactaattgtaaaaccttgctctgttttttggacaagccattttaagatagacatatgttcttccgaataaagacgatgacctgcctcatttcttatcggagaaataatattataacgcctttcccatgcccttaaggtcccaggttgtattcctaatttcttcgagaccgcttttatattatacttacctgcagacatcgtcatcttcccctctagtacagcccttatcacacctagtataaggggtgaatgatgtttgtgtaaactttgtataagcaaatcgctacttttttgtatttatttcctttttaatataaaaatatgtgattctgcaggagccatcagtcttaaaggtaacgttgtcgtaccatacccattactaatgacaaccgtcgttcctttaacttttttaatgccacctttttctcgaattccccaaccaaataaacgaatttgtcctccatgagtgtgaccagaaagaataagttgtattccactattgtcaggccagttctgcttaatatcagggttatggctgatcagtatttttgttttttcggtggcttctttaactgcatcctctagtgagtcattttctgttgaaagatcgtcaatccccattaaacttattccctcgtcaccattgttaaggtttattgctcgatttttaaggatgataatatcttcatccattaacagcttttcaagttttacggggtcttcttcgtaatcattatttccccatacaaagtaacaaggtgctattgcccttagagattttaaattatagcgaactttctcaaaagaaacccctttttccataacatctccaccaataacgataatgtcaacctgatgtcttactttttctaatactttgtttgatatatatcgattatgagtatccgaaataaaaaagattcgatatgaatcgaaactttctggtaaattttcgacatcaatctctttcgtaacgactctgttaagatgtgcttcaatccacatatagattagtagcactattccaattaaaacaaggccaacaaaataaatcatgtatcattactcctctgaaagcgtttcaattctcttgccgctcttatattagcagttaaaacaccgtaactaaatgccatcacaagtgaagcaagtgacaaccatttattcgtttcaaataatacccaataaacaacaattaataaacttccttctatcaacaaagtaatcaagtgagctttattattaatccctaatgcaagaaacccctccacatgctctctaataacgcgagctacaaaaagaaaaccaaacaaaaaacaaagcgctccaaaaccataacgcccgctgtttaacatgaggtctgtgaatgtcatgcttttaaaatttaaattactttcagctataaacaacaagcaaaaaatcgctacaattcttattattagaagcggcatagtaaaaccccccactctaacatatgtaagagtaggaggctttatgggtactattcactcatacttcttttatatcaagaactttaaatccattctgttcaagttttgcaatgaattgatcaatattttcctttttctcaatcttcattacaattctcctgacattctggttagactcatcgaatgtggacagcgaaataatattttcatgaaaactttttgcgattttagcaagccttgcaattctaccttctgtctctgaagatgcaaaagcgattcttatgcccggcttacgcatgccaaatgcactctgaaattgatcaagtatatcagatcgcgtaatgatgccaataaaatgctcattttgatcgacgactgctatgagaggagcattctttgctaaaagaagagtattctcaaacacttcttcttgatcaactgtcacatctttttggtaggcaatttcacctgcatttgtttccgacaagaatttttctttatctgtcatatcacttttgaaaaaagctttataaatacgattaaacgttacaattccaacgtattttgttcctttaacaaccggtacaccatcgatttctcgttcctttaataatgtgagtgtttcatccaactttgtgtcatcattcacataaacagtttctcgaattggtttcattgcacttcgtacgtacatggctatcacctctttgtaagatcactactcttaattaataccacatttctaagataatatccttctaaaataaaaattaatgatgaaatgaatcgttttcttccgtaaattgggcttttaaatttcttgaagattcagtctttttgaggtaagattaaatcataacaagatcactttggaacgcacacaacaaaacggagatgatggctcaatgattaataaacttaaaaccaaatcactgttagggaatgaagacttggatttcaaccgtcgattgggtatgcccgtcgaagttttctgcccaaaactgaaagatactgtcgccttcggaaagattgagatgttcgatgaagatcaactttctataaacggaaacaacttccaaattgaacagtacctattctttggttgtcctgagcaaaggtaacagtttatttataataaagattaatgtcgtattccttttttaaatatttaaacacaacatgacgactttcccattgtttttgaccttcaaatagttcatcacttcgatctaatatctccagtcttaaggactcatattcatcctcagctttcttgctttttttagaaaacttccttaattgaaagtaagtaacaatactactaataaccaatattagcagcataggaaccgaactaaaagtaagttcattaacaaaaaaagatgtgctattttctagctcataccaaaaaaaacaccccatgcttactaataaaaacgcaagaatatatccgtaagactgtgattttgctttatactgcttttcaacattctttcgttccactaattcttgcaacagaacgatcgttactttcgactgtggttgtggaaggttccactcttttaatgcgtccactttatcccccccttttgttgaaactagtttatgcaggagcttagtttgttacgacaggggggaataaatcaatttaaactatagcgattttatagaaaatatgaatacaacaggaatagagaaaccatcccaataaacagtagtgcgagtactcgaattaatgtgaaagaaggaatttctttttcttcatttccctttcgactcgactgcttttttttcgtgcttttatttcgatggtattccttcctagaaggtagtggactttcgcttttcattaaactcacctttcatgatgtgatcatattcgtgctttctgctttatgagacaggccataacaaaatcgattaaaaaatgagctgtgattgttgtcattaggttatccgtcacttcatacaaaacaccgattaaaaaactaatcaaaacgacggaactaaataagacaggtttagaaagataccggacatgtatgagcgcaaataacaaacttgaaaggactaaaccgaaacttgtttggataacacctctaaacaacagctcttcactaaatgaaatgatagcacacaaaaagaaaatatgagaaattgaaagacgagaaaaaatccgctcattaattcctccatcatccaacatctcttgaggtagagtcttcataagaatgaggtcaataccaatcacaaggaatgctgtgcctccacctaaaatgattatctccgtccaagtaaaattgattaaatctgcgaaaaaccacatatcttgaaacaaaaataaactaataatacctgctagaataaccaatataatctgagttaaataaacattcaataatagttctcgatctgttaactgttttactgcttcagcctgtcgatttctcaccgtgatcctccttgcttacggtaagcatccgcttcaattcagcttcccaatcaaatgcatattggtcggaaacgttgatttgatcactacttcctttatattcttgaaggtttagcccacaataatcacagcacggttcaatgatatgattaggttctccaaacctttctaataaaccttttcttctacaccgtttttcttctagccagcttttaaatcgaaaccattttagaagctttgcttttctatgtcgttctattgctgttaaaattcttgctaaattaatatcgacatcaaaagattggatcactctttctttgattacgcctattccctctaactgatgaagcaagtagcgccatgctgtctcagtgtagccaaatcgatctccttcacgttcgagctgataactagagtaaactgttccttctctctcaaaaaagtcgagtaacacttctttcacttcatgttcttttggaagctccgaatcaataaaggaaagtggtaaaaactcgtcttcttctgtgtataagtgaatggcgatggatggtaattggtcccttcccgctctcccaatttcttgcaaatagctttcaattgtagatggtgggtgaaaatgaatcacaaagcgaatattacttttgttaatccccatcccaaaagcattcgttgaacaaataatcgatagctcatcattgagaaactgttgttgaatcaagagacgatcctcctgttccattcccgcatgatacgatgcacaatctctaccttcacgactcaatgctttcgctagtttatctgcccaacttcgacttgagaaataaattatacctggacctttcagttcaagtgcgtattccttaaccgcctcgattttagtttcaagagaggggagtttttctagcttaatcgctatattaggtcggtccacgctatgtacatggatggcggggtcgctcatatttaattggcgaagaatatcacgacgaacatcttcagtagctgttgcagtaagagcaaggagtggcggatgaccaaacgcttcacgtatagctccaagcttcagataatccgttctaaaatcatggccccattgagaaatgcagtgagcttcatctataaccattaatccaatatctaatttttttaaagcttgatatacaaatttattttgtagaatttctggggatacatagataaaggaaaaagttgataaattctttaaaatgccttttcgcttttcaaaatccagaaatccgtttaacgcaatgactcgtttttcaccttgtgcttttaattgctggacttgatcctccattaacgacactaatggggatacgataagaattggagaaatccccgcatataatggaagttgatagcatagggatttcccggctccagtagggagcatggcgaaaacgtctctattattgagtacatcagtaataatttcttcctgaccatagcgaaattcgcggtagccaaagtgctgatataataagtctgataacgacattaaatcccttctttgcaaagagttaatcgaatttcaaaataggaatattgatcgttcacatagtccttaattaattttaatcgctgactgttgatttccttactagctaacctgatttctaattgtgcctttggatccacaaatggatttattgagaattccggaacatttatcgcaatctcgactaggtgatcctcaattgtactccgcttgagccttcgagtatgagcaatttgttcaatcgtcattccgtcttcaagaagcttaaaagtttgctttgttgataaagttaatggcaactgcccgcttgctccctctatcattgaagcaagaatcgggtattgcactgaattgtgctgaatctggaagagtaaaccatgaataacaccttgaaaacagattattgcttcttcataacttatcttatgcaaatccgctagttgatgaacggtcaaccccgttctcccttcgccgcttagtctcataacaaaaaaagaagcatggggatttggtagtttttgaagatgcgatcgaatttcctgaaatagttcttctgcgagaagtactctcttttctttcttgactggaaaatgctttttcacccaattttgtatttcttcatctttactgattgggtaaaaattcatgttgccatgaattgaataagaaaggctctgcatgaataaactaagccgctgccaaaatagttcacttacttgatggtactgccaaccagataaataatccggtattggtttcgtgactaaaaaggtacttaaagcctcttttccgtctgaagtgatttgatatccttcgttttgattcgattgaatcaagtgcgtctcaagtaatgtcaaaacgtgctgttcaagttttgaccgctttaatttctttaaaatcccaaagaaactccctactttaaaaagcttcccatcttgtatggtttgagaagatttctttccagttagaagatggtatacggcagatagtgaacgttctcccttaaaccggtcaaaaatatataatagcacaccgtcgaaatatttcatgaatccaccacctatttccttctccattattgtatcaaattttttcatctgtttacttattttaaaaccgggtaacattcatttagatgctaataaaaggattaaactattgaaaagtcaaggcatcacctttacaataagattattaaaaactttcatttacgaataaaaggacgatgaaaggcatatagaagtattgaataggaggttaaatcatggctaagtatactattgtagataaagacacatgtattgcctgcggagcttgtggcgcagccgcacccgatatttatgattatgacgatgaaggtatcgcttttgtaacacttgatgacaacgaaggtatcgttgaaatcccagaagtgcttcatgaagatatgatggatgcgtttgagggttgtcctactgattcaatcaaaattgctgatgagtcatttgatggagacgcaacaaaatttgaatagctcccattagaaatccctggttttttaaatcagggattttttattatttttaaaaagaaatgttattgttgaaattgacactttagtgctttcatggtaaaaagtaaggtattgagttttctaaaaaatgagaagagatagacaaagggagtggagaagttggcttacgttctagtaactgatggtattaaggaagatggtttacagccactgttaaatgaaagcacgctcacatgtgacattggatctttacatgatttcagtgatcgtcttgatcagtatgaagctttgcttgtaagaagcgctacaaaagtaaccgcagaagtgcttgatcaaatgcctgcattacggattgttgcaagagccggtgttggggtagataacattgatattgatgctgccacaaagcgaggcgttattgtcgtcaacgctccagatggcaatacgatttccacgacagaacatacttttgcaatgatggcttctttagctcgcaacattcctcagggaacatcctccttaaaaagtggcaaatggatgagaaaacaatatgtcggaaccgaacttaatggaaaaacactagggattgttggtatgggacgtattggtactgaactttctagaagagctagagcctttgggatggatgtggtcgtttttgatccatttttaacgaacgatcgagctgaaaaattagatgttcagtctgttgaatttaatcacttgctagccgctgcagatattattaccgttcacacaccactaactgaaaaaacacgcggtcttttaaacgaagaaacgctcgcgaaaacaaaaaaaggcgttttcttaataaactgtgctcgtggtggcattattgatgaggaggcacttatcccatatcttgattcaggacatattggtggcgtagcacttgatgtttttgtagctgaacctccagaggaggatcatcccctccttcgttatgatcaagtgattgccactccacaccttggagcgtctacgaaagaagcacagcttaacgtagctgctcaagtagcggaagaagtccttcattttctaaaagaaaaaccaattcgaaacgcaatcaacttacctggtttttcaaaggaagaatacgaaaagattaaaccttattatgaacttacccgtaaaatgggaagtattctttcacaatgtatgaaatcagctgccaatttggttgacgtaacgtatgctggtaagttgactgaattggacaccgctatcttaacaagaaacttgatggcatccttcctaaaatcaagactagatacaactgtaaatgaagtaaatgcaccttcgattgctagagaaagaggcattacttatggtgaaaagcatagttctgaaacacatggatactcgaaccttatttcagtttcggtacaaggagacaaagaagccttctcccttcaaggtacctacattaaagaatatggcgaccgaattacgcaattaaacgggttcgatattgacttccatcctcaaggccatcttctctatattcaacataacgatcgtccaggcgttattggtaatgtagggaaagtacttggtgaacaccgtattaatattgccacgatgcaagttggtagaaaaacggctgggggtgaagcgattatgatgttatcatttgatgcgccattgcctaaaaatatagaggaaacactagaagatgttcaggatattgtgaaagtcgagcaaattggtggtgtttaaacatctaaaaaaggaacaagagcatttttgctctcgttccttttttttataagttaattggtttacgttctcccttttcaaatgtcatcagtttcgaataaccgacggatttggcaagtgctacggcctgattatagtctgcaccgacgtctgtaggtacgtgagcatcagaagaaagaacgattgggatatccttttcatagcacattcttagaagctctggatcaggatagagctcacctaccggctttcttaaacctgctgtactaatttcaacacatgtttttgattgagataaagcgttcgtggcccgatcatattgttcaagtagaaagtcacgactttcaggtttatatttaaagatttttactagatcgagatggccgacaatatcaaataaattggattctgctagcgtaacgacttgatcaaagtatttacggtagacggtgttaatatctttttcgtcccagagatgacgatattccgctaaatcaatcccaaaatcttctacccaatgaatcgatccgatcacgtaatcaaactgataaccagaaataaattctttcatctcttggtgttttccgggggtgtagtccatctcaattgacatcttaacgtccatccccttctcttctgcttgttggaagagatgaacatagtcttccatgttataccatctgcgttcattgacccatggattacttaaaatgttctgcgtttcataaaaatgataagcatgctcggaaataccaaaatgactcacattttttcgcttcgcttcttcaacgaactgagataaataatcaagagttaacgttcccttttcaaggtgattgtgataatccgtgtacacagctacagctccttttatcgaactagtttgacacttcccgtcattattgtaacgtattaacgggacgaaaggatacctctatcgccttcttttctatcaatcattttttccttcaccggaagaagcctccatttttccggagacttcttatgtctacatcaattcgacaatatgcgagcggtgcctgtcactcaaccttttctggtatgaagaaggagaatgtcgtgccttctccgcttttgctgtggacggaaatatgacctaaatgagattctacaatgttgcgagcaattgcaagaccaagccctgtgcctgatcttcctcttgtacgggctttatctgccttatagaagcgttcaaatacaaacggaagatcatcctccggaatacctgatcctgtgtctgccacatcaaattgcacacctttttcaagtgaagtgatcagtaagctcacttcacctccacctggggtatgtctaactgcattatccaataaattggttaaaacttgttcgattctatccgggtcaatcatcaacattcgatcttgatttgatacatggaactttaagttcacttctcgatctcgggcaagaccagaaaatttccttaaaatcctctgaccaaagtcttgcaaatgaatactgctgtagtgtaattcattgtgaccagcttccattcttgcgagatcaagcagttcgttcacgagcctgcccattcttagagactcgtcgtaaataatttgagctacttccttcttttcttcatcactgctcgcaatgtcatccacaatcgcctcactatacccttgcaacattgcaattggtgttcgtagctcatgtgacacattcgcaataaaatcttttcttaatttatcaagccgacgttcttctgtcatatctcggaatactgcaactgcgccacgaatagtagactgattatatagtggagtcatgacaacaacccaacttcttccttgtaactccacttcagttagctgttcccgttcaagcataacgactaaactgaacaattcgttaatatcttctggcacttctttttcgggatcttcttccatcccctgttcgtagtaccatgcttttagaaatcgctcagcagggggattcgtgcttaatatcgctcctgttttatcaaacgttatgacgccatcagccatgctgcttaaaatactggaaagctgttccttttcctgatttaaagcggtaacatagttatttaattgtctgcccatccgattaaaagcgacagaaagttctccgatttcatcatgagtaaccattggtacttttgtatcaaacttccctttagctacctgggtagcagcttccctcatctttaataatggtgcagtgatgcgagttgataagaaaaaagcaaaaatagttgttaaaacaatggcaattccagcagctatgtagattaaattacgggcttgactggttgtcttcgcaataacatcaagcgattgatatagaaacaccgcgctatcattttcgccatcgacttccataggtactcccacgattagtaactcattatgtgactctggattacgagttgtttcaaaatccccttgttttacaaccgtctctctctcagtaaaaacgccattaagaattggatcttctttaaaaacttccaatggtaattgcggtaaaccgtgtgagtttggtgaataccataattctccgctttcttctttatcaattatcatcacccttgtcgggtaaaagtctgtgatttcccaggcagtttcaagcgcttgatctcgatcatcatatcgctcgataacagaagccactttatttgctagtcgctccatctgttcggcttctttttccacatgaaaatcctcaaaaaattgaagtaataaaatggttaagatcgatagtacaaatgcaactaagaggataattgtaagccaaagcttacctacaacacttctccaaatcattactctttaacagcctcgaacttataccctacaccccaaactgttgaaatcattgcagcagcttttggagaaactttattcaacttttctctaagtcgttttacatgagtatcaacagtacgaagatcaccaaaaaattcgtaattccatacatccttcaacagttcttcacgagagaatactttgtcaggcgcttttgcaaggtaatacaaaagctcatattctttaggtgttaaattaataatttgttcctctgctagaacacggtgtgcatcatgatcaatggttaaatgcggaaacacgattacattttttgtggttgtttctgtttgtagaaattttgtcgttgacgaccttctaagcagtgccttcacacgaagaacgacttctctcgggctaaatggcttcgtaatatagtcatctgctccaacttcaaatccttggacgcgattggcttcttcgccttttgccgtcaacataataacaggtgtcgctttttgctcacgcatttgctgacaaacttctattccatccattcctggaagcatcagatcaagcaaaatgagatcaaaatcatcttcgatggccatttcaagtgcttgttctccattttccgcttcttcaatttcatagttttctctctctagatacatacgtagcaactttcgaatacgctcttcatcatctacaactaaaattcgtgcgtctttttccaagaagattacctcccacatgagctcatgtgttctattctatcatgtatttagctttacagaccagtaaggggaagccccattccgatatttcacaaaagctatgtattcatatttaggtttcctttcagcatgttctaccttatgaacaaataaacaaactgccccttcttataagaaaaccttcactattcgtgaaggttttctttgttatgcataagaatgaagcccagaaataacaagatttacaacaacgaggtttagcatgattatgacaaaacctactactgctagccaggctgacttctcaccttgccagcctcttgagagacgtagatggagatacgccgcataaaagaggaatgtaacaagcgcccatacctctttagggtcccacccccagaatctcgtccaggcagcctgtgcccagatcatcgcgaagattagagctccaagtgtgaaaaccggaaatccaatcgcaactgctcgatattgaatttcatctacaagttcttcattaacatttttaagggcaggttggatcgcagcaccaattcgcttacgtaagatcaacctgatcagaccatataggacgaggcctcctacaattgaccagatgagtgtatttagcttatgagcagctttctctcccttcatccagctaggagcttcaaaaagagggccaaattcattcccacttacatatttcccatcagttggaccagctagtgctggtaacgtatagtctactgtaacctgttgctcattctgatcaacaaattgataggtagacgaatagcctgcagcttcgaacccaagagaaaggatgacaaaggcaatcgtacttattaaagaatacatcacaaattcaagccaaaaagtagacttgcttgctttcttctgatttaccgttttaacaaggtaaacaagaccagcagcaaaactaatggctaaaatcccttcgccaagtgcagccgtcgttacatgaattttaagccagttactttgtagagctggaataagcggctgaatgtctgatggaaacacacttgcataagcgataacaataatggctaccggcattgcaaaaaccccgataacattacttcgatagatcagatatataatcaagaaggcgaagaccatcgccatcccgaagaacgttgtaaattcaaataagttactaacaggggcatgccctgctgcaatccatcttgtaataaaatagctcagttgaaaaagaaaaccaaccgttgaaagaataaatccccacattccccatttttttgcatgagattcctcatccgactttcgccattttctcccgaatagagaaatagcaaaaacgatactcgctgcaaagtagataaagaaagcgacataaagcaagttactgcttaattgagccatcttatcttgcctcccttcgtggtgctaacaatctatttcttttgttctgcctggtctatcggcatttgaagtccagtttgagtcgagatactttcgagttcacgctttaaaccataccagtttttatttgtatgagaagataaccagatgtctttatctgttcttcgtacccaaattcgacgatgattccagtacattccttgaatgacaccaatcataaagattgcaccaccgatagcaagaatccataaagtgttatcttttcttacaacaagtccggacacattttttgtatctacgttttgaaatgacattttgtaatcattttccccaagcggttctaagttctgcttaatcgcaacaaaagcaacttctccatctggatgctcaggagaaaccatattcaagataaatgcaggattatttggaactttcgatttagtcgtcggttcccctttatcattaaactcgaaatcaggaaaataatccatcacttcaacgcgatatccattatcaaggtcatatgatttatcaggattatataaattaattgtaaggtctccaacagattcaccagtgtctttattatccattgtaaatgacatcgtttgaagttcattcaacttataatctacttgataaatcgcataaccatcaaacttaagcggtttatttacctgtataggatgctccttcactttctcgagttcaggatcagttcccgcgattctttcaccaacttgcttgtataaaacagcgtcagtttgatagtttttcgcaaccactgcttgtcctgattcttcaatcgcatttttgaatttttcatcgttattgtcatacgtttctaatataaatccgtcgctttgtaaataataagcttcttcggtacctttaattttttctgtttcaccttctcttaaccagagaacttcatcaacatacattcctggaaaaaagcgaagcatgccaccgatcagaaatagtataagtccaatatgattcacatatggtccccatcttgaaaatcgatttttttcagcgaataggtgacctttttcttcttttactttataccttttcttttctaaagcttctttaatgccctgcaagtctggcgtattttcattgatttctgttacaccgtagtatttctgacgtttcataaagctctcatggcgaataacacgctgtttttttagggagcgatataacggaacaaagcgatcaagactggcaacgattaaagatagtccaagtgctgcaattaagagcatgtaccaccaggaaccgtataaattatgaaaaccaaggtcataatagagttgaccaagtacgccatattgttctttgtagtaaactgtcggatctgacagcggcggtatgtacatttcttgaggaaaaattgtgcctattgcggaagcgacaagtagtaaaatgatgatccaaattcctaccttaacggatgaaaagaaattccagatcttatcaataatcgttgttttatacgtttgtgacctacgtgcacttccttcatatctcatattaagtagttgcttagaatctaaatctccttgaagcggtttaccacatacttcgcatatctcagttccataagggttcacatgtccgcattcacaggtgatgtttttgttgctcattggaacaccccattacggttggatttgcttcatataactatcaataacttcctctgaaagactagcttccgttttttgaatgacctttccatccttatcaattaaaaaggtaactggaattgggccaactccatagtgatttgttacatcattgcttttatcaagcaacactggaaaactaaggttataccgatcagcaaagctttctgctgttaatttaggctctgaaacattcactgctaatatttcgacacctttttccctatattctttatacatcttgtccatagcaggcatttcatctttacaaggctcacaataagttgcccagaaattcagaaagaccccttttcctctgtagtcctcaagctcaacttcatttccttctagatcagttaatataaagttaggtgcttgatctccggcctgtacgattccgctttcatttgcaaaaaagtttgtatagaacgtatagccgactgctataaagacgatagccaatataacagtccgcacgatcagccggtttttctttttcatcgaaccaactccaatcaaacaaagcaatactactctcactataacgtgtcattaagtcggaaccttatcgtttttttgaattttgtgtgacagcttggttacgtagctgttttacttcataaggttttagttcacgataatctccaggattcattccagttagctctaaaaagccgtagcgttctcttttcaacttttgtacaggataacccaaagtttcgaacatccgacggacttgacggttttttccttcatgaatcgttagttctacgatcgacttttctttttgtttatcgactgataatattcttgcgcgtgctttagaggttttgccatcttctagctgtacacctctttcaagcttttgaatggtttctttgttcattaagcctttcaccttcgccacatatactttgtctacgtgataacttggatgcataagcttattcgcaaaatccccatcatttgttaggagtaaagcacctgacgtgtcgtaatcaagtcttccaacaggaaaaatacgttcttcgatttcatgaaaataatcggtaactgcttttcttcctttatcatcatctattgttgatatgacgcctgttggtttataaaacaaaaaataaacaggttcttcgcgttctacctgtatcccgttcacttcgattttacatcgttcagatacctttgtcccgagttcagtaacgactttgccgtttactttcactctaccttcttcaatcaatgtttctgcttttcgtctagaagttacaccagcctgagcaattactttttgcaaacgttccattaaattcacctcactaaaacatcatactcttgtcacagtcaaacctcaagcacagattcattctatcatttattatgctcaaacaagaattttccaaaccttctgttagcatttaaaaaaagccatgcgagatggcttttacccaaagacgagagtaacaaataaaatcgctgcggcaattccgacaagatctgctagcaagcctacctttagggcattccccatgcgtttaatcccgattgctccaaaatagaccgtaatgacatagagtgttgtatctgtactaccctgcattgtagaagctaatcttcctatgaacgaatctggcccataagtactaataatgtccgtcgtcatggcaagcgcacctgtaccagaaataggacgaacaagggctaacggcactatttctgttggcactccaattgcttctaaaggaacttttaacaaactgcttagaaaagccattgctcctgaagctcgaaacactgaaatggcaaccatcatcccaacaagataagggacgattgagacagcgatagaaaggccttctttcccaccttctacaaacgtttcataggtaggtactcttttccaagttccatacgctaatataaacccaatcatcagagggataatccaaatcgacatactcacgtcgaatcgccccctttacttctcctataaaaaaaacgatcgatgagaatcgctccaattgttgagcatgccgttgctgcaatagttgtacctattatttcagttggcgaaacagaaccatatttcatcctgatcgcgataacggttgttgggattagcgttaaactagacgtattaagagcaagcaacgtgaccattgatctcgtcgcgttgtctttcatgtcgttaagcttttttagttcttccatagcttttatccccatcggtgtagccgcattaccgagaccaaacatgttcgccatcatattggaaagaatatagcccatagctgggtgatctggtggtacctcaggaaatagttttctagcaattggtttaaaccctttccctaatagatcaagtaagccagatttctgagcaattctcattaaaccaagccaaaaaataagaacacttaacaacccaatacaaaccgctaccgcttcttctgcgcctgtaaaaattgctttattcacttcttccattgttccattaataagggcataaaggatgccaatcaggaataaaccggcccagatgagattaaccattgagctcacgacctctatcgaatgaaaaaagctctttaaaaaaaccccagaaacttttgttttcttccttatctccctcgtacataattggtgctttgatgatcgtttcatcatttaattttacataatacatacctaccggctcagacgatccaagttcatcccatttatttttatccggtggctctacgagttggatggttgattcaacctgatccctttcatcttctgctaacggataagaaaggtctctacttaaagtaacgttacctttgtatggttctttcttcacgtcctttagcttacctttaggctcaagaagggttagttcatagtttgcgtatccccaattaaacatggaaatgtgatcattccaatcgtctggagcatctaacgttacagcaataagcgtcatgtcatctcgctctgcagttgaaacgagcgttctttttgctcgttttgtgtaaccagtttttccacccgtggaatccgaatataaacttgttaaaagcttattcttgttacgccatacataatcccactcttccatttcgttgggagccttatgtactttcgttcctgaaataattcgatacgtctcgttattcatggcatactgagttagcaaggccatatcaaatgctgatgaaagatgattttcatgatcatccaaaccatgcggattcataaataccgtcttcgacatcccgatttcttctgccttttgattcattaacgttacaaaaccttctaaacttccaccaacctcctcagcgatcgcgaccgcagcatcgtttcccgagcgcaacattaaaccgtacactaagttttcaagcgttattttttctccttcttttaagtataaagaggatccttctgtcccagcagcattacggctcactgttactttctcattcattttgcctgattcaatcgcaagaactgctgtcataatttttgtgatgcttgctattctccgttgggaatacgcgtctttttcatagaggacccttcccgtttcttgttcaattagtatcgcgcttcttgctgaaacaccgattccaccagcaaaagcctctcctggaatcattagaaacagcagagctgcaattaatattaagacgccaatttttgtcttcaacgagttcatcatgacatccacgtcccttaggctctgtatttgtacaagtctatgagcatgaatcgtgggatatgtctatcaatcctcgtttacgtttgaaaatacaacccgataatctgtgacatcttttaacgccttttcttcaattggaatgcgaactttcaataacaaaatcccgtttaaaagtgtaaacacaattgccgtaatataagaggaaaaaataagtgggagtgaaataatttcgagggccacaataatataattgggatgtttcatataacggtagggtcctgttttgacaacgttagcatctggcagaacaataattttcgtattccaaaaccgtccaaggcttttgattgtccaaaaacgaagaaattgtgccagaacaaatattcctaacatgattgtccaaagtatcgataatgaaaagccacgtaatatggtttcaatgcagacagcaagaagaaaactgatatgcagcatcacgatatacttatagtggttttggccaatttctttcgctcctcgctccttcatccacttctcattactcttcgcaagcattagttcacctaaacgctgaataactagaatactaaaaacacccgcaaacagaagactcatttatgtccctcctttttcccattttaataacaatagttctgaacaaaacccaggtcctagtgcagccataagtccaatatcttcttctttacaaccgctttgtaaaatttgatccaatacgtatacaaccgttacagaactcatattgccataatttcttaacacatctcgcgaaacagacgtcatgtcatgactgaaaccaagtgcttcctcgtaagctgtcaacacttttgtccccccaggatgagcaataaaatagtcgatttcttcggtagttttcttctctgagctaagaaattgtaaaacatttggttcaagccaacttgcaacaattgatggaattgatttagaaaaaacaacgtgtaagccttcattgcttacttcccagcccattacatcttccgaattcttcattaatgttgatcgtgtagctactacttttggcagactgctcatgttggaccgttttttaattggtgacttttctccaatcattaaaacggaagaagttccgtctgcaaacaatgccgtacctattagattacttttggagtagtccccgtgctgaaaagttaagctacacaactctacatttatgacaagaacagcctgctccgggtgagcaagacagtaatcattagctctcgctatacctgcagctcctcccgcacaaccaagaccccaaatcggaatacgctttgtatgaagagaaaacggaagaacattcataagtcttgcctctatacttggtgttgaaattcctgttgttgagacaaaaaagatcgcatctatatcttcacagctaacagcttcttttagataagctggattctgaagacattcctctactgccttcttcgcatattcaacagcaagcgtaatgtatttttcgtttttttcttcgaaggttggtccgctactgtaccactctagcggcatcgaaaaatatcttgtatcaatttctgcactttgaaaaacaggaagcaggcgttcaatatctttaaaatgttgaccaaactgttttttggcaaatgaggcagcttccgtttgttcgaggcaatgagggggtagacatttcccgattgataggatcattggcttttactccttttaccttttcaactagtttccgaaatcctcctgctttttatacaagaagttccagcggagcgggatttgttctcatgtttcgttgcttattaaaacgaaaaaagatgtctcaatctcgagacatcttttcattttcattatttaacgtattcgtagacttatttctcttaattttagctaaactcgcgtaaaggttcgataaattcgacttatccagttggtgaaaaaactcttcttcactattgatatagagacgttttcttcctggataaaacgaaaggagatttagagcaacagcctcctgtaatggtagatcataatcccatatccctctagccaatgccttttcaccaaaaatagcaggatacaagacatgaaatcttttttcatttccatcctgaacataagttacagtagagcgaacgaacgaatcctctggggaattggaccgctctttctttaggtgttcataggtgacatcaactactttcatcgattatcctccttcaccaattaagcaagttattctggaatttcctgaaacttctcaaaaaacaggtctgcttcttcctcttccttatcttcgctaccatctggaagtggcgggagatctttaattgagcttaatccaaaatgaaaaagaaactctcgtgtcgttccataaagaatcgctctgccggctttttccgctcgccctgcttctttgatgagtaatttactcatcaaagtttgaagaggcttatccgttttcacgcctcgaatctcttcaatttcaaccctcgtaatcggttgtttataagcgatgatcgcaagcgtttcaagagcagcttgcgaaagcgtatgattaccaggtgtgtcgactagcttctcgatataagacgcgtttttagcatttgtcgttagttgatagcccccaccgatgaagctaatcttaaaaccacgatctttttcatcatattcttgttgcaaatcttttagtgcatctagaagggtgtcctcctctaacgaagtagtttcacaaagagatttgacagtaatcccttcgtccccaaccacaaacagaagactttcgatgatgctctttatttcttcattcgtcacactgatgccttcccttctcgttcaaaaatcatgatttctccaaagttttgatcttgttcacatgctacatctctcgttttcattagttcaagaacagcgagaaacgttacaatcatatgtccgcgatccgcttcactaaagagctcgctaaagcgtctcctagtgcctccttgtaactgatgacgtatatcattcatccgatcttcaattggaatttcttcactttgaactgtcgtccgctttggttttttatcctttactcgcctcgtcattttttgaaatgctgcaagcatatcgtataaagtaacatccccaattgatgtttgatcatcttcttgggtgtattcacttatatcagcaggaggccgcacatagagcaaacttcgactagactcttttttcttaagatcatttgctgcttctttaaatcttctgtattcaacaagacgttgaacaagttcatcacgaggatcatcctcaaagtccggatcctgttccaatatttcttcttctttttgcggaagaagcattttgcttttaatcgcaagtaatgttgctgccatgacgagatattcactcgctatatcaagttctaactcttgcatggtgtgtacaaatgttaaatattgatccgtaatttgcgagaccggtatgtcataaatgtcaacttcgtacttatttataaggtgcagtagtaaatctagcggaccttcaaacgcatctacttttacattatattgcatcattttccatcttcctttattcatgtccatcgagtataccgattatatcatatttccactatacgaccgatgacggatctctttaaaagttatctataaagcgatgcactttcgatgcctcgcgctcatgtgctacactacaaaagaaacggaggaatcagtatgtatccagtagcttatattgaatatctggctcatttccacggtcttcgtgactattttgagtgtcatgaaattctagaagaacattggaaggaagatcctcgagaaagtcgtaagcttcattgggtagggcttatccaaattgctgttggactctaccatcatcgacgcggtaacttcgctggtgccaaaagaatgattacgaatgcgaggcgtattgtattaaatgaaagagaagaacttgagcatttagccatcaatattgatgagctttctgaaaacctcgcttccgaacttcaacgaatcaacgaagccttgccgtataacagcttcgaaataccacttacaaataatgctcttctcactatgtgtcaaaatagatgtcttgaactcggatgtatttatggtagcaaaagtgatcttgctaacattgaactgattgatcgtcacacaagaagagatcgatcagatattatccaagaaagaaagcaacaacaacaattaaaacagcagaaaaggaacggctaagccgttccttttctgcttataatcaatcgtttacttcatgttctcttctaggtgacaccgttcgaaaaaagttcctgtatattcatttcctttaatacatatctcatcactgagcatttcccgaagtgcttcaaccatctgttttccaatcccttgatgacggtgagaaggattgacgctaatatcttttaactccacttcgttctcgtttacccactcaataccgagcaatccaatgatatcttcttctttccaaagaaaaagctgcagtgaatccatttcttcataatctttaattgattgctgcagtttttttatatctttttcatttggcataaaacttaataatcccatggctattttctcatgagcttttttataacgaattagcatgattatccctcattaaagtaattcttggctctccgttttgtaacatattcgaacgtaaatgagaatgttcatctcatctaacgaaagagcgcagtgagcatgatcactttcgatcacgcacaaacgaatccactaatattcttgatgacttccgggtatttcacaagttttatctacccttttccgcatatcatactcatcatagccaaaaatgaacagataatcaaccttcaaatgattttgataaattcgccatttcaattgccgcagttgcagcgtcccagcctttattcccagccttagtaccagcgcgctctactgcttgttcaattgtatttgtagttaataccccaaaaataacaggaacgccagtctgcatcgttaagttcgctactccttttgaaacttcgccacacacataatcaaaatgcggtgttgctccacgaataacggttcctagcgtaataatcgcgtcatattttccggtatccaccattttttttgcagcaaaaggaatttcaaatgcccctggcacccaagctacatcaatgttatcttctgagaggccatggcgttttaatgcgtcttcagcacccccaagtaatttacttgtaataaattcattaaatcttcctactactatacccacttttaatccagatccaaccaaatttccttcaaatgtttgtcccatcttaaataacctcctatagtttcgttactttattagaaatgtagcatatgtcctagcttactgtgtttggttttcaggtagcgttcgttctcttttcttgaaggcatttgaagcgctactcgtgacgctacttcaagaccataaccagttaaccccgctatttttctagggttgtttgttaacaagttcattttggagacaccaagatcacgcaatatctgagcgccaatcccatagtctcttaaatccggcttaaatccaagcttttcatttgcttcaacggtatcgtaaccttcttcttgaagcttataagctttcatcttatttagaagtccaatccctcttccttcttgacgcatgtagagaagcacgccgtgcccttcttcttctatttgtgccaaagctgcatgaagctgtggaccgcaatcgcagcggaaagatccaaagacgtcacctgttaagcattcagaatgaacgcgaacaagcgtcggttgatcaggaaaaatctctccttttattagtgctacatgctctttctgatcaataatgtttgaatatccaacagctcgaaaagatccaaattcagtaggaagttcgatttctacttccttttgaacaagaacatctttacgatttcgatactgaattaaatccttaattgtgatcatcttcaaatcgaattcttcagagatctcttttagatcagggactcgtgccatttccccgtcttctttcataatttcacagataacaccagcaggggctgaacctgatagtcgagctaaatcaactgctgcttctgtatgtcccgctcttctaagcactcccccatccttagcaattaaaggaaagatatgacctgggcggttaaaatcagcgggttttgcatctgggtggatgaggtattgaattgttgtggctctttcagcggctgaaataccagtggttgtacttttgtgatctacactaacggtaaaggccgtaccatgagaatcagtattatggtcaaccataggacttaatttcagttgattcgcgcgttgttcagtaatgggcgtgcaaacaagtcctcttccttttgtgatcataaaattaattgtctctggcgttaccttatcagctaacgcaataaaatctccttcgttctctctgtcttcgtcatcacaaacaataacgacccggccttgcattaaatcgtaaatggcttcttcaattgtgtggaacatgacttaacctcctcttgcatcacttatttaaacccatgatcttcaaaaaactggctccctagtgaagcagtgggctctggcttcgatccgcttctttgttctagatatctcataatatacttcccaagcatatcgcattcaatgtttactgtatctcccactcttttcttaccaagcaccgtttcttcgacagtatgaggaataagtgaaatcgtaagagagtgttccccgatcccaaaaacagtaagacttgtgccatctacagaaacggatcccttttcgacaaagtaaattaacaggttccgaggaatggagatatcatagtaaatcgcgttatcaatttgctcgactcgcgtaatttccccgacaccgtcaacatgaccagaaacaaagtgacctccaaaacgtccatttgcggacatagcccgttcaagattcactgaagaattcggcgctagttgacgcaggctactagaacgaaatgtttcaggcataatatcgacagaaaaagaagcatctgtaaacgatgtaaccgttaagcaaacaccgtttatcgaaatactatctcctagatgaacgtccgataatactttcgatgcagcgatctgcatcacgatcgactctcctgcttgctgcacactttccactctgccaatctcttctacgatacctgtaaacattatgaagtcctccttgatgagataatacgaatatcttgtccaatgcgttcaacgctttcaatcgataaatcgaccgcttcgctcatcaattcaaatcctttagctccaaatgctgttggagattcttttccaccaatgagcttaggcgcgatgtatgtaatcacctgctgaaaagtacgagcttccaaaaaactaccgtgcacttcagatccaccttccacaaaaatggaagtgatttctcgctcccctaggagagctaatacatcttcaataggaagtgctggattagctatttcatgcacctgaacatgtgcgggaaatgatcgctcattctttagcacagcctgtttggttgttataatccaagtttccgctttctgatcatttattacttttgcatcagaaggaatccttagattacgatcaaggataattctgatcggagaaagaccttctccatatcgagtcgtaagggacggatcgtctgatagaaccgttccgattcctactaaaatagcgtcatgctgatgacggaaagcatgcacatctttccgagcttcttctcctgttatccatttgctatcaccagtatgtgaagcaattttcccatctaacgttgccgcagcttttaaagtgacgtatggccgtttatgagagatatagtggaagaacatccgattcaatttgaaggcttcttcctctaatagtccaatagttacctttatccccgcagcttgtaacttggacacacctttacccgctactagtggattcggatcctgactagccacataaacttcgctaactcctgcatgaataagagcatccgaacaaggaggcgtgcggccatgatgactacacggctcaagcgtgacataagccgtgctaccctccgcttcactcccagccattttcaaagcctgtatttctgcatgcccttctccagctttcaaatgggcgcccatccctacgattcgtccattatttacaagtaaacaaccaactgcaggatttggacgtgtttgaccaatcgtgctttttgccatttcaatcgcagtgttcataaaatccctatgatccatcgtgtttgctccgtttctactctccatagtggttaagaaagagaataaaaaaactcccataacggcgttatgggagtcaaaattatatgccaaataagccttttgaatccacgattcaaaaggagattggtcataagtttccttctcccatccagactatactgtcggttctggtttcacaccagatccaccgtttgcttacgcaaccgggtcacggacttagctagcataagctagacatcaccgccggttgggactttcacccgaccccgaaggaaagtatttagtttttatgcgtctaatctattcttcgtcccagactttaacttctttcatcacatcgccttgcttaatgcgaagaaccgtatccattccttctgttacctgaccaaaaacagtgtgaacaccgtcaaggtgaggctgaggttcatgaacaaggaaaaactggcttccacctgtatttttacctgcatgagccatagacaacgaaccagctacgtgcttatgagggtttccttctgtttcacagtcgatcgaatagcctggtccgcccattccagatcctgttgggtctccaccctgtgctacgaaacctgggataacacggtgaaagtttacaccattgtaaaaaccttcgttagcaagcttttcaaagttagcaacggtattcggtgctgcctctgggaaaaactcaatttcaattgtttctccattatcaaatgcaattgttccttttttcataaataaatcctcctgcactaacaattttcttcaaagctctttcattatagcacatacttaagctgttccctatcatttctacttttacaaagttattttgaaataatcgcttgttttaatggaaggtcatgacgaattaaatcctcaaaagattctctctttacgacaagttgtgcttctccattttctacaaaaaccaccgctggtcgaggtagtctgttatagttatttgccatagaatacccgtacgctccagttgaaaatacagccatcgtatctcctgctatggcgcgctgtaatgtgcaatcccagattaacatgtcacctgactcacaacattttcccgcaacagaataaacatgttctctcggctcattcatgcgattagcaatcgttgcttcatactttgcttgataaagggctggtcgtaaattatccgtcattcctccatctactgcaagataatgacgaagttctggcactttcttgtgtgatccgactgtatataacgtcaagccggcttctccaacgagtgaacgtcctggctcaatccaaatttctggcattctcattgaattacctaactgcgctcttacagcattaaccattgcctcgatatagtctccaactgggagtggatgatcttcttcagtataccgaattccaaaccctccaccgaggttcagaacttgtggctcatacccatagagttcaaaccaggtagcaaggtaacgatagattttctcaatagccattacaaaaccattcgtttcaaaaatttgggaaccaatgtgacaatggagaccaaggaggtgaacagctttcatgcttgttgcttgaacaatcgcttgttccacttgaccactttgtaaatcaaaaccaaatttagaatcttcctgtccagtcaagatatagtcatgggtatgtgcttcaattccaggcgtaatacgcaaaagcacatttgcaaccacatttttctcttccgctaattgttcaagtaacgttagctcataaaagttatctacaacaaagcaccctatttttgcatctaacgccattcgaatttcggcttcgcttttgttatttccatgaaagtgaatgcgatccaccggaaaccctgcttttaaagctgtatagagttctcctcctgaaaccacatcaagacttaagccttcttcttcagcaagttgaatcattgccatacaagagaatgctttactagcataggctacctggtagttgaccttctcttgttcaaaagcatttcgaaatgctctcgctttctctctaatcatcgctacatcataaacgtataaggccgtaccatatttttcacttaattctactgtatcaacacctccaactgataaatgaccttcttttgaaattgctgacgttccgtataaattcacgatcatttctcccctctcgctgatatgaatgcgagcaaccctccataaaataagaaaaacagccaactttatagatacattggctgttttctccgtatcctcacgagttggattagctcaccaccgaaagaattcctctttcagtgacagtctgcaacttgttcagcagcagcccagcaagaaatgaatggcccttttctcacttcggcaaattgacctttctgatatcatcctcgcattccattctatgctcagataccatactcattcgttttgcgcctctatccccattacattcaatgaggtctattcgattaagaaataaattatcatactttttaagattcggcaagtggtttgtccgattgcttcgtttcattttgtggttctgtaatgcttggacgtagtttagtgagcggaactgatacacgaatcaacacgtgaataaaggctttaggattaaaaggaataaacggccataagtagggagtgtttaaaggttttaacgcaacaaggaataaaatgattgccgtaattccaatcatatatccgggcactcgaaagaaaaagacaaggaataaaagaagaagccttacaagtttattcgcgatcgataattcataacttggtgttgcataagaacctattgcagcaatcgaaacatataggataacttctggaacgaataatccgacatcaatggcaatctgtccgatcaacacggctgcaattaaccccatggcagtggaaagtggcgtcggggtatgaatagcagccatcctgagggtttcgatcccaacttcagcaagaattatctgaataaaaatcggtacatttgtttcatcattcgggccgataaaatcgatcgtttttggcagtaactgcggttcatataccgctaataaccacagaggtagcaagagtagcgcagctaacatcccgccaaatcgaacccatcttaaaaacgcgcctggtaaaggggcttcacgatattcttcagcatgttgaacatgatgaaaaaaagtagttggtgtaataataacgcttggtgaagtatcaacgatgattaacacgtgcccttcaagtaaatgagaagctgcgacatcaggtctttctgtatatcgaacaagtggaaatgggttacctgcctggtgcacaagaaactcttctaccgttttatcggccattggaataccatcaatgttaatttcttttaatttctttttgactatttcaactaaattaggattagctacatcttgaatgtaggtgatacatacgtctgttttagaccgttctccaacttgaaaaatttcattccgcaatcgaccatctcggatacggcgtcttgttaaggccgtattttcaatgatgttttcagtaaaaccatcacgtgaacctctaataactttctctgtatcaggctcctgtggcgttcttcctggatattttcgaacatcaataatataagcgatttcttcgccttccataaaaactgcgattaatccagataaaacctggtcgacgacttcatcgaacgtttcaacctctgtgacctgctgatgtggcaaatgattatgtatcacctgctcaaatttaaccgttaatcgatgatgatcatctatttccattagttctcgcataatttcaacaatgatggaagtatcacaaagccctgtacaatagtaaaactgaatttctttgttaagaatcttaagttttcgaactcctacatcaaaactttttccaattcccattgatttttttaagaattcttcgttttcttttagctttttaaatattttttgtttattatcgattttagtggtcatagaaaccgctcctttcaagcaaaatttgaacggctttcaatgttataggtgaaccaacttccggatcatcataacccgacattttacctatatcaccgacacctataataatgggaaggtttaatttatctaatatcgacaccgtgtcgccatctattctccccgcctccatatctgcaaatccatttttgtcgactccgtagtgtgtcaattctccgtcacgatcaatggagacatctaccctcgtccactctgaaaaatgagttctggatgcgactgcaatagctccaaggagttcaatactttcatcttcggcaacagactgcatggcaagttccccatatccttcacccggaaatccactatcatcaaacataacaaaaactggatcgtgaggagcttctttaataagagcgataatttcgtaaccagcaagcggggtaggatttcctgcagattgactaatgcatcttcctccaatatctgacgctactttttcaattgctttttgagcataaaggtctccgtctgtgacgaagatcacccgccgctttttcattattctcacccctttggtttaaatagaatggctacaataaatccaaaaacaattgcagaagaaatacctgcggaggttaattgaaatattcccattgcaattcctataaagccgtgttcttccccttgttgcatagcgccatggagaagtgaatgaccaaaactagtaatcggtacagtcgctccagctccagcgaattcaattagtcgatcataaatcccaaagccatcaagcacggctcctgctacaacaaaagaagacatgacatgcgcaggtgttaatttaaaaatatcaagtaataattgaccgatgacacagatacctccaccgactgcaaaagcgataaaatattccactatttcacacctccaactcgctcaaatacgactgcgtgagcaatagctggcatcgattctttttgctgaaccattacgggactatgcaaacatcctgttgctgtgacaagaattttgttataattccccttttttagaaggtcaataaggtgaccatatgtgactatggcagaacaagcacacccacttccaccagcaaatacttctttttgatctggtctataaatcatcagcccgcaatcattatgattgtttgtgatgtcaaatcctttttcacttaacaaatctcttacaatcggagaccctacagctgataagtcaccggtaacgataagatcatactctgaaggttcaatatttaaatccttaaagtgagtcgctagtgtatctgctgcagctggcgccatcgcactccccatatcaaatggatcctttattccccaatccaccactcgaccaattgttgctgcggaaattcttatatccgatggttcttgactaattaatgcggcacctgcacccgtgacagtcgaggtagccgttccgggcttttgaccaccatattctgttgggtatcgaaactgcctttctgctgtcgcattatggctacttactcctgcaatagctttgttagcaaatccaccttctactaatgatgaagcaatagctagagattccattgaggtagaacatgctccgaaaacgccaagaaaagggatttgatttgttcttgctgtataagttgcactaacaatttgattcagtaaatcgcctgcaacaaaaatatcaacgtccttctgagttaattccttttttgataaacagctttctaccgcatcttctagtaactttctttctgcgagttcccaattatcctggtcacaatgaaggttactataggtgacatcaaacgaatctccgaacggcccctctgcttctttaggaccaaccgctgtccctacagattgcaaaaaaacagtagagaattcccaagtttgttttcctgacttcataacaattctctccttatattagcgctttaaagagcattcttagtatgccgacaatatatgctgcaacaacaccaaacacgatgaccgaaccagcaagtttgaacatgttcgttgcaattccaagtacaatgccctcacttttatgttcaagagctgcgcttgtgattgaattcgcaaaacctgtaacaggtaccgcggaacctgcacctgcaaattgaccaattttgtcataccaaccaaaagcagttaaaagggctgcgataaggatcagtgttgcaaccgttggatttcctgcattttcttctgaaaagttaaagacgttcatataaaaattctgtacgccctggccaaacatacaaataaatcctcctacaacaaatgctttcaccacattcaatacataaggcggttttggctgataagttttaatattttttgtatattgtttctggtcgttcaatgaatttgccattactttaaacctccatttacaaagattgtccaatgaaacaatgatccgaaaacctttcctaacacaatagccattagtaaaaacaagatcttatcgataaaaccaattcgtttcgttagtataggaagaacgtttaacacttccgttaaagcagccgctaacataccaataaacactcccgctccaagtccaattgggacaactacaaatttagggaggtttaaagttgggtttcgtaaagataaccagcttgatacaacagccccaataataattccccattcataaaaacgaataagatgtaacgtctttgatagctgtgtaagacggggaataataccaagaaccgaaagaaaagcaacgaagccagctcctacagcaattccctctgcgaagccaattaacatgacgagtaaaaactgaacattcatggcttgttttgaccattctcatcgttttcatgtacaatgacgtattgatcaagatcctgttggtaattaaacatttctacttctagagggcttggctcttcattaaatcgctttttaaaaagatggttaaagaagagaaccatcccgattccgagaccaaatgaatagggtacttgcagaagcaatggcttcggattatcgattcccgtcacaattttataaatctgttgatgaacctctctcatactgacatcttcgtgaaagttcatgatcgcgagagcagccccaataaatagtaaaaaccagataaacacaaagtaaacaggtgctagttttttcttagggtattgaacttcaacaattgtttgcgtaggaccaacaacttgtacttcaatatttctcataactttttgtattgctattatcactttcattacatcgatgacaaccaaatttttatcttcttttgtcacctgataaatagggattttttctactttggcacatttcttgtcctctccaattaactgggcaatatctccaatcaaaagttctttatttggggggactttctttttctgcctgagtcgaagataaatcatctcactttccatggtccttcacctccttattcaaggggcacattggttatagtatgtttctaccaaatcactctcattctcacggtacataagtaccattaattccctaaaacgaattgaagttcactcttatcacttctccttctaaacaaaaaaaagaacagatgagttatttactcatctgttctttaatttgttttaaaatcttcttttctaatctcgaaacttgaacttgagaaatgccaaggcgttcggctacttcagactgagtttgatctttgtaataccttaaatatacgattaacctttctctcgtatcaagatactgaagcgcttcctttaaagctaatttatcgaaccaggcggtatctgtgttatcggcaatttgatctaaaagtgtaattggatctccatcattttcataaacggtttcgtgaatggaagaaggagctcgtaccgcttcttgagccagcacaacctcttctggtgtgacctcgattcgttctgcaatctcatttactgtcggcgttcttccaagggttttggataactcatcttttgccttacgtactttatttcccgtttctttaagagaccggctcactttcacagtcccatcatcacgtataaaacgctggatttcaccgataatcattggaactgcataggtggagaatttaacatcgtaacttaaatcgaatttatcaacagattttagcagaccgatacatcctatctgaaagagatcatccgcttcataccctctatttagaaatcgttgcacaactgaccaaacgagacgcatattcttttcaacaatgagatctcgcgccgcctggtctccatcctggctgtgtttaatcaattccttcacttcatcaggctttagttgcgactgcttcccttttctaacctccacgtccatatgcaggtccccttaattacataacgctttattttttgataggtacttcattaagtgaatcgttgttccctgtccatttgccgattccactttaacctcatccataaaattttccataattgtgaatcccatacccgatctttctaattcaggctttgaagtatatagcggctgtctagcctcctcaaggtcttgaataccaacaccatgatcacgaatcgttaaattgaccgtatcgtcatttaactccacagaaatataaaccttttcttctccgttttgctcgtatccatgaataatggcattagtaacagcttctgaaacaacggttttgatttcggttaattcatcgacagtaggatcaagctgagcaataaaagcagcaaccgttacacgagcgaaagattcattctggctaagcgcagaaaattctaattccattcgatttctcattacgccacccccaaagttgcgagagcatgctgttcatcagcttctagtctcacgattttaaagagtccagacatttcaaacaaacgctttacaggaggcgaaatcgaacatacaaccatttctccaccaaaacttttcactttattgtaacggccaagaacaacaccaagaccagaactatccataaaagatagtccttcgagactaagtacaatatgctcaattttacgttcttcaataatcgtatctaccctgtctcttagttcttctgacgtatggtgatccaactctccatcaagtctaatcaaaagaacgggatgtcttacttcaagattgatcgaaagactcacgtaacattcctcctcatgtttgcttgtgagttttttctctctttacagggttaattccttcttcgtgacaaaactagtgttgattcgatgaaagtggtgatcacttgacactttgggtaggtgctttggcgaattgcgccgccgttcgtttcatcaactgccaccaggaagctttgtttatatcttccgcagatataacgggggaggttgccgtcacatgcccgtcaattttcaccgacagctcacccacctcatccccttgctttacaggtgtttcaatattcttattgattttaatactcgttgttatatcaccgttttcctggcctttttttagtaaaacagagacacgctcagaagtgacaacagacatagaagactgatctcctttatttactttcacttctgtgacaacattgttacgatcgaatagtttttgggttttgtattgagaaaacgcataatcaaacagttttgtaatctcagcattacgtacttttggagaaggagcacccatgacgacggcaacaactcgcatgtcatctcgctttgctgtagcagtaagacaatattttgcttcacttgtaaatccagtctttaaaccatcaacacccggataaaatttaacaagtttatttgtgttaacaagccagaattttttatctgtatcctgtcttaaatagtcttcatataagccagtatatgttgtaatcaattcatatttaaggagctctttcgccattaatgccatatcatttgctgttgaataatgatcttccgcaggcaaaccagtcggattaacaaaatgggtatgactaagacccattgattccgctttttcattcattaacttaacaaattcttcttccgaaccagcaatcgcctctcccattgcaacagaagcatcattaccagaagcgattgcaatgcctttcagcatatcgttaacagtcatttcctctcctgcttcaaggaaaatctgcgaaccacccattgatgcagcatattcacttgctcttaccttctgatcaaggcttattttgccgctttctatcgcttccataattaagatcatcgtcatgatttttgtcatactcgcaggaggaagctttttatcactatctttttcatacaatacttcacctgtatctcgctcaatcagaattgcagaagaagaattctctgcgatttttagcttttcttcttctgcatgggtaaaagaaggaacaagtagggttcctcccagcaagaaggcgagcgctgttgcaacaactttcattggtgatccctccattcttagtattacaaggatttccaacatgttggaaaaatatacgaattcttgatcctccaaacgaagatcacttaaaaaacgcaaaaaaagaagcctcatatagagactccttctaaagataacaaagcggtatttagttaatcactttataaataagttgaggtttttcagtagcttgtttagaaaccgtgtacgcttcattaatcttattgatcgagttttgaacgtcttcttcatcgctgtgaagaacaacaagcgcttcgcctttctctactttgtcgccaacttttttcttaagtgtaattcctacaccgtggttaatttgatcgtccttggttgctcttcctgccccaagatacatagctgccacgccaactgattcagcatcaatttccgtaacgtatccgtcttgctgtgccgttacttcaatatcatgttttgcttgtggcaatttagaaaggtcatcaatgacactaacatctccgccttgagcttgaacgagcgttctaaatgattcaaacgccttcccattttgcaaattttcttcaagcgttttatacgctgtatcaaaatcatcaaatgcaccagcaataactgtcatatgagaagcgagttcgagggatagaagacgtagatcctcaatattctctccttgaagaacctgacttgcttcacgtacttcattggcattccctacttcaaaaccaagcggttgactcatatcactaattaccgcaaccgtgtttcgtcccagattcttaccgatattaaccatttctttcgcaagtgcttcagaatcctcaagtttcttcataaatgcaccagagcccgtttttacatcaagaacgatcccatctgctcctgaagcaagctttttactcatgatagagccagcaattagaggaatcgaatcgacagtagctgtaacatcacggagagcatacaacttcttgtcagcaggagccagattgcccgtttgacctgcgacagaaagtttatgtgtattcacgttattcacgaattcttccttagtcatttcaatatgaaagccttttatggattcaagcttgtcgagtgtgccgccggtatggcctaaaccccgaccagacattttagctactggtacgcctacagaagctaccaatggccctactataaacgtcgttttatcacctactccacctgtagaatgcttgtccactttatggcctttgatcgctgacaaatcaatcgtttctcctgaatccaccatagcttgagtcagcatggccgtttcatttgacttcattccattaaagtaaattgccatcaacaaggctgatgcctgataatcaggaatatcgcctttcgtatagccttcaataaagaaattgatttcttctttcgacaattcttttccatttcgttttttttgaataacatcaaccattctcatttaatcgctctcctttctaccttaacccattttacttacaattgttttaactaaaagcaggaagttcgactttaccttctccgttgtttcaatcacttcgtcatgatgaagtggttgatcgaggattccagctgccatatttgaaatgcaagagattccaagtacatccatgcctgcgtgtctcgcaataataacttctggtacagtcgacatacctactgcatcgccacccaatgtacgcagcatgcgaacttctgctggcgtttcataagttggtccggtatttccgacatatactccagattgtagtttcattccaagttctgttgccgtatcttgtgctaaatgttgcagatccattgaataagcggtagacatatctgggaaacgtggtccaaactcattactatttggtccaattaaaggatttgttccaaagttattaatatgatcagcaataaccattaaatctccaggttggaactcttcatttataccacctgcagcattcgttacgattacttttagaatcccaagttctttcatcactcgaacggggaatgttactttatccattgaataaccttcataaaagtgaaagcgcccttgcatggctgctactgcttttccatttaatgttccgaatacaaattgtccagcgtgcccttctactgttgaaacggggaaattcggaatgtcactataggggatttgcactgggttttcaatttcttcagccagtacaccaagaccagaacctaagattagcccgatgtctggacgaaactctccaacttgactttgtatataggatgatgcatcttgtatttcttgtttaattgtcattttcgttcctcctcttgattcttaaagctttttaagaaagcttgtcccgtgttttggtaacgttacatcaaaattatccgcaattgttgcaccaacgtcagcaaatgtttgacgaataccgagatctactgctacttttatccctttatggtaggcaagtaatggaacatattcacgtgtatgatctgttccatgatggattgggtcattcccatgatcagctgtgatcaataacaaatcatcttctttcattcgacctagaacttccgttaatctctcgtcatactcttctagcgcttcgccataaccttgtgggtctcttctatgaccatataatgcatcaaagtcaacgaggttaaggaagctgattccttcaaattgcatttgttgagtttcaagcaacttatccatgccgtccatatttgatttcgtacgcagagactttgttacaccctcttcgtcataaatatctgaaatttttccgatagcaataacgtctttcccactgtcttttaattcattcataaccgtatgtccaaaaggcttaagcgcataatcgtgacgattggaagtgcgtttaaaatcgcctggctctccaagaaacggccttgcaattactcttccaaccatatattcttctgccttcgtcatttctcttgcaatctcacaaatatgataaagttcatcaagtggcacaacatcttcgtgtgcagcgatttgcaatacagaatctgctgaagtatatacgataagcgcgcctgttttaatatgttcctcgccaagttctactaaaatctccgtacctgaagcaggtttatttccaataatctttcttccagttctattttcaagctctgaaatgagctcatcaggaaaaccttcagggaacgtacggaacggttgttcaatatgaagacccatgagctcccagtgtccagtcatcgtatctttcccattcgatgcttccatcatttttgtgtaatgtgccataggctgctcaaccctcgagatgccattaatttcacgaatattaccgagacctaacttttccatattcggcattttgaggccattcatatgatctgcaatatgccccaatgtatctgcacctagatcatcaaattgttcagcatccggtgcttcaccgattcctactgaatccattacaactaaaaatactcttttaaaacgtttagtcatgtttatcctcctcgttcattatccactcaagattattattcccttgaaaaaaacaaaaaacacatttgtgaatgcgtttacgaaagcagaaaaaagaaaaaatctggccaaagaccagacctctttctggagggtgcctttattaggctctaggatgataagtggaataaatatcctttaacctcgctttagtcacatgtgtataaatctgtgttgtagaaatatctgcatgtccaagaagctcctgtactgctctcaaatcagcaccattttctaataaatgggtagcaaatgaatgtcttaacgtatgtggcgtaagaggcttgagaatatttgcttttactgcaagcttcttaagaattttccagaatccttgtcttgataagctttcaccacgatggttcaaaaacagcatatctgttcgattcttcttcatcaattgcgctctgccttcatcaaggtaggtcgtgagagcatctcttgccattttacctagcggaacgattctttctttatttcccttacctatcgttcgaataaaccccatcgttaagtgtacatcttccatttttaaatcgatcagttcactaacgcgtaaaccagttgcatacaaaacttctaacattgcgcgatcacgtttcccgaagggagtcgaataatccggggcttccaataattgttctacttcagatgttgaaagaatttttggcaacttccgctctgtctttggcgtttctatatgtacagaaggatcttgatcagcagccttctctcgtagtaaaaactgatgaaacgctcgtatggatgcaatgttacgagcaattgtagtggatgctttcccactgtctctaagtgcatagagatagtttacaatatgcatgcgccgaacatcattcaaagaagatatattctcattttcatttaaatgttttaaatattgagcgagatctcgcctgtatgcatcgagcgtatttttggacaggcttcgctcaacgattaaataatgtaaaaaatcctgtacctgatctttcattgcaaacgctcccttattcacctgtctggtaaaacaaattgagcctttcaaggaaagtgagctgagtatccgattccatttgaacgactttcactgcttttccttgtggcacatcatagcgatggtaattctggtattcttgatttacccagagaatgccaaagtaaaatagtaaagtacatccagtaaaaagcaagaaaactttcattgtatctaaaacaagcaatagaccctgtttcaatctaacgcacctccatctctagtaaaagatatgccagagatggagttttttatacatcgttaggaaatgtagggtcacaaaattgttttttaactattaactatgattaacagcttgttctgactgttctttatcttcctgcttttgacagcgataacagattccatgaaacgttagacgatgatctttgattttaaaattccaatcgttttcaactactttttcaacatctccaagcaaatcttcctgaatttcatctactgcaccacactcaatacaaacaaggtgatgatgaaaatgagcagcgccctcttgtcttagatcaaaccttgacacaccatcgccaaaattgattttatcaacgattttcaattcagctagtagctcaagcgtacgataaaccgttgctaagccaatttcaggagatttctctttaacgagtaaatacacatcttcagcacttaaatggtcttcttcgttctcaagaagaacccgtacggttgcttcccgttgaggtgttagcttatagctttgagaatgaagatgtttcttaattcgatcgattctgctttccatgtcccatttccctccctcgatcgatgccattttcattataagcagtaggcaaaacggtgtcaaattaaaatcattatcaacccaaaattgtaatcattattacctgctatttatttcaatattattttatatccacaactgcttttattaatccaggtgataaataggcctcaaaccacgccgcaacacataaaagcaccaaagcgcacaagataagagccgaaaacctcataaacggagggaagattggttctgaccttcttttcataaataattgtttcattagcctaagtgaaaatgttaaagaagcagtggctaccacaatcattaccggaacggccaagatgttttgtggaaatacagaaacgaaagccaacaaaaagcctttccaactcatttgattaactagaaaccctacagtaaaccctacaacaattccttttagaaaaagcatcactaacacaataggaagaccgataattgtaagaccaagaagccacatcaaaccgatatacttcgcatagtgtgttaaactttgctgaaacatttcagaagatgatgcaaattggccatcggatacctgtccaaaaaaccgacttaaataaaccgcaagatcttctttttgagtgaaacttaaactatttacgataacagctccaaacacaattcccatcagaaacaaaaccgcaataaatgtgtagagagataactgatctgatagatgagcggatatcatttgctttagacgtctgctacgattcatacgtcttcccccttcataccacctttggtaaagtctatgaaaagggagtgaaacgtatgactgatcgatagattatctcttcttcttctgctgcttgatgacctttccgtatgtcccaccgccgccttgttttaatgcaagttctccacttcgtgaaagaacaataaggtgagcgagtggttccccaactacattagccaaatcactttcgctaacggcatggagaatgttcatttcggttccgaaaacagctaaaagccgttcgaatgttttcggacctagtcctggaagaaaatctaaaggaacatgatgaatataaggggggcgcttaggatgagtggaagcggaacttaattcttgaattcgattcaagacccctttcactattttatgactaccacaagcttcgcaatatgtttgaagtacaggggtgtgacattgagaacaaatggttctataatacttacctaactttggactcaagccaaaattcgctttaattccccggccttctattccttttaaagccttcgaccattctgtaaatgtcgcctctcttacagataatagctgatattccctagccattttttgtatggagtgcgcatcggaattagttaaataagggaaagtatgaagctcttggatctggtctgccatttgcgtatctgacgaaagtcctagttcaattccgtctattttattaagatccagcacttcacttattgaccgattaacccctttaccataaagacttttaaatggcgtaaatacatgagcaggtatgaataatccagcaagttctcttgttttctcttgaataacttccgccttttcataaatccgctgtgagctaagtgtaacgtttttcatgcgtgaattaagccactctgaaaaatgtttcatttttgataaattcggcaaatacactaatacgtgaataggaccgtgacagttttcatcatagatttcaatttcggttcctaaaatgagagtaagtgacccgaagcgaatgccaccatctctcaattcgtaacctagacctctatcaatgtactcttccaactctgcaattacttcaggaacgtgacaatcaattacaccaatcatatcaagaccttttctcgatctcgcttcttttaaaattgaagatagggttaaagactttgctcctgttatttttactgctttattggtccttgtccttccaatatgtatatggaagtctgcataacatgaattcatttcatcagcttcatttttaaatacatgatggcatatgccgtttttgcgtcatgaatctcctggctatctagcatttcttccatttcttctattgataaatgaagcaaatcaagaaattcatcttcatcagcggactgttctccctttttcgttaatcctttggcaacatataaatggactagctcattagcaaagcctggagaagtatagaacgaaatcactttttcaagtttttcacacgtataaccggtttcttcttctagttcacgcacagcagttaattcaggctcttcaccttgctcaagtttacctgctggtatttctacaatcgctttgccaagcgctttgcggtattgcctaaccgcgagtactttatcatcaggtgtttgagcaataatcgcaactgcaccgggatgatcaattaattctcgcttgctttgtttaccattcggtaactgaacatcctctactctaacgtcaataattcgaccttcataaatcgtttctgagtgcaaagttttttcatataaatggtccattggttcatcatctcctggttctaaaaattcgaatcgatacataaagtctatcacatgagacaaataatagggaaagatagcaccgtatcgaactatttaggaggtcttgattatgaaagtttatattcagccgaatgggattacgatggttggaaagccaaagcaaattcaattaatgatcagacactatatgaatcattatgaaacgattgaagaatggattcacgcccctgcagttcgtacaaaatcgcacttgagattaattcaataaacaagaaacgctgccaggtattgtggcagcgtttctgttttaacgaatttcggttttgaagatgtttttcatttgctgtagaaaaacatcatggtgttcagaaaatgtagccatacaattgctttgagcaacggtatgaaaccctcttgcataggcaccatacgcggttaaaaaatcacatatatcggtacatacgcctgagagatgaacggtgtctatgtttttgcttttcaatatttcttccaggtttgtgttataaaaagcgtcatattctggtttaggtacataggttacttgtgcaagattttgattcgcttcaaaccaagttttcaattccccatataagtcttggccccaggatccgataacattatgtacgggccaaatcttaaagtgctcatcattttcttgatgggcatccatacatatgacaacttcctttccttcttcaagaaactcgtttgcgagcgtgataatatttggaacaatctcctgccctacttttcctgaagtaagtccaccttgatcgtgaataaagtcattgctcatatcaataattaataacgcttctttcatcattctacccctcctagtgcttttactatagcaggtggttttccaggtgacaagacaccaattaccagcatatcattggcgtgaaatcgcgtataacggtacacttaaaatagaattaattttgggaggtatgcttcgatatgaaaaccaatcaaattggcaattcaaagcttcatgttagtgaaatcggactaggaaccatgtcactaggaaccgatcgagcgaaagcggtatcactcattcacgaggcggtcgataacggcgttacatttatcgatacagcagatttgtatgacttcggtttaaatgaagaaatcgttggagaggcattacgtgatcgaagagattcagttgttcttgcaaccaaagcagggaatcatttcgaagaagggaaagagggatggtactgggacccttctaaaaagcatattaagggagccttaaaagacagtttgagacgtttgaaaacggatcatattgacctttttcaactacatggtggtacgattgaagatccgatcgatgaaacgatcgaggctttcgaggaattaaaatctgaaggcctcattattgaatatgggatttctagcattcgaccaaatgtgattcgagaatttgtaaagaaatcttctatcgcttccgtaatgatgcaatatagtatactagatcgtcggcctgaagaagaaatgctagatttattgcatgacaataacattagtgtcattgctaggggtcctctcgctaaaggaatgttaacagatcgctatgaggaaaaaattaaagaagatggttttctcgactattctaaatttgatgttcttgaaacggttaaacagctgaatgaaataaaaggggacaagcgcaatatgactcagacggcacttaaatatgcacttgctcaccctgctgtagccaccgttattcccggagctagtcgaagtgaacagcttcttgcgaacattaccgcacagaatgctccagacttaacacccgatgaagtacaaaaagtacgtgacgtttcgaaaaaaaatgtatatgataagcaccgttaaatttaaaatagcgcagtcatttgactgcgctatttccttttcgactcaaaattaaaatctaaaaggcgtctaatatgggattatttattattagttttggttctgttgacgcttgaatttgctcaatactatagccagttgccacttcttttaatacaagtccttcaaccgtaatatcaagaacagctcgctctgtaataatgcgattgacaacacctttcccggttagaggaaggctacatgagtttagaattttaggttctccatttttgttaacgtggtccatgatcaccacaatccgttttgctccatgaacgagatccattgctcctcccattcctttaatcatctttccaggtatcatccaattcgcaagatctccattcttcgaaacttccatcccacctaaaatggctacgtcaatatgtcctcctcgaatcattgcaaatgactcagcgctatcaaaataagcagctccttgcattgcagtaaccgtttctttccctgcattaattaagtcaggatccacctcgccttcacttggataaggaccaatacctagaaggccattttccgattgaagaacgatctttttaccatctggaatgtaattagctaccattgttggcattccaattcccagatttacgtaagagccgtccaggatttctttttcagcacgtcttgcaatcttttcacgaactgctgctttatctactttaaccatcattagcctcctatcgcgtcgttaatcgctcaatcttcttttgctgctcaccaacaataaccttctgtacataaatgctcggagtatgaatagaatctggatctaactctccaacccccactaattcttctacttctgccaccgttacttttcctgcggctgcaatcattgggttaaagttgcgtgccgttttgttgtagactaaattccccattacatctcctttgagtgctcgaacaaaggaaaaatcagcttgtatcgcttcttcaagtaagtattcttttccattaaatgtttttacttcctttccttcagcaatcggcgttccgacgccagctggagtatagaaggctgggattccagcccccccagctctaattcgttctgccagtgttccttgtggaatgagctccacttctaattctcctgaaagcacctgtctttcaaactctttgttttccccaacgtaagaaccaatcatttttttaatctgtttatttttaagaagcaatcccagaccccagtcatcaactccacagttgtttgatatgactgttaagtccttcgttcctctctcttttaatgcaagaattaaattctctggaatacctactaagccaaacccaccaacaagaatcgttgctccgtcctgaacatcttgtactgcttcttgaaatgtatcaactattggtttcattcacttttacctcctaccattttaagttcgttcaacaattgttgctactccctgtcctccaccaatacaaagcgtagctagaccatagcgctcatttctacgtttcatttcatgtagtagagttactagaattcgagtgccacttgcgccaatcggatgaccaagtgcaatagccccaccgtttacgtttaagatttctttattaaaatcaagatctcttccaacggcaagagactgtgcagcaaaagcctcatttgcttctactagattcatttggttcattgaaagcccagcacgttcaagtgctttcttcgtagccggaactggacctagccccataacgctcggatctactccgccgcttgcattcgagcgaataacagcaaggtattctattccaagtttatctgccttctctttactcattaaaacaacagcggctgcgccgtcgttaattccagaagcgtttcctgccgtaaccccaccgtctttcttaaaagctgggcgtaactttgcaagtttatcagctgtcgttcctggtttaacgtattcatcagtatcaaataaaagagggtcaccttttcgctgcggaatagaaacagggagaatctcttctttaaatcgtccctcttcaatagcagcctgtgctttttgttgactccaggcagcaaattcatccatctcttctcttgttagctgataatgatcgcacagattttcagcagtaacacccatatgataatcgttaaatgcgcaccataatccatcttgaatcatgctatccaccatcttttggtcacccattcgtaagccttctcgcgctccgtttaataaataaggtgcctgactcatgttctccatcccaccggcgacaacaatatcttgatcgccaagcataatagattgagctcctagatgaacggttttcaatcctgaaccacatactttattgattgtcatcgctggagttgaaaccggaattcccgctttaatcgcagcctgacgagcagggttttgtccgagacccgcttgaagaacgtttcccataatgacttcttccacctgatctatcgataagctagccctttcgatcgctcccttaatgaccgtggccccaagctctgtagcagatatagattttagtgaaccattaaacgaacctaccggcgttctgatagcgcttacaattacaacatctcgactcatttcgatttcctccttatgtatctatgactctcttctacataattcttacttaaaacaaaaaaatccttctttaaagcgagaatttccattattcaaacgattgtcttgccagactttcaaacctttgttttaattaaagatagcgcttacaaagaagggtgatgaatgttttgctaccacaacacgccacaatcattgaagtaggtccaagagatgggcttcaaaatgaacagaaccaggtcaaaactaatgataaaatccgttttattaaaggtttaaaagcggcaggaatgaaagaaatagaaattacttcatttgtatcaccgaaatgggtcccccaaatgaaagatgccagtgaaatagtaaaaacatgccttgatgatactcggaactttgtcttagctcctaatcgtaaaggggtagacagaattaaagaaacgaacgtgaaagccatagcactttttgctggtgttagtaactcctttaatcaaaagaatagcaataaagggacaaaggagcttcttcatgagctctttcctttagtcgaagaattaaaagcggatggttacttcgttcgagcttgtatttccactgctttctattgcccatatgaagggaaaatagacggtaatgatacaattgacgtttgtcatcaattcgttgatgcaggtgtagatgaattaagcgtagcagatactattggaatggccacgcctgaggaatcgcacaacctttttagccaacttgtaaaggagtttccaacaacattgttaacagcgcatttccacgatacacgtggaatggcccttgctaacatctatgcatgcctgcaagctggaatttcaagatttgatacgtcagctggcggactaggcggctgtcctttcgccaaaggagcgacaggcaacgttgccacagaaagtgttgtctatatgttggagagaatgggaatcaaaacaggtattgatctagaaaaactaatgagagcaattgatgagattgagcctcacctatcaagatccatcctaacaccctatcgaacgttatataaaaaagaaaaggaagcctccataaagtagacatataaatattatggtaaactaaataaaataagcacacaatagtgtgcttatttcatccttttactatagttaaaataatactatagattagagctagaactagtccaccgataaccgtaattcggtccatcttttgacctttaaataaatttagaactccctttacgaccataaatactacgaaaaaaataacaaaatacatcaaaaacgtcactctagtaaatccccctaatcgttatcctttgtttatataccgcattctcgggttaatgatttcactatcacttttaagcataaaacactggtgtttcggaaggaaatcaattttcatttctttatcaaaaaacactttatattgtttctgaatcaatacaggtctgaaatttgattcaagcgtcatattaaaatcaccctgagcggaatcatttactaattgcgtaacaccgttcactacacacccgcaatcttcgatgtcataatgtaacttcatatacccctcagaatcatgttctaatttctcgatcgcttgatctgtgaatgtcactctcatgttatctctcctctccactatcttctataataacgtctataaactcaatagcccagtcacaccactcaatccaggttttcatctgacgcctaccgtattcaagcgttaggtattcccccagacgatctttctctattctatgatcaacttcattttcttctttccaactgttcatatgatcaagcaccatttgatgatgctctttactctcttttaaaaattggatcgcttcttcttttggaataagatgaaataaagaaacacgcatcaattgttcgtttttcatttttggtggttctacagtatggtgagcaagccattcaatgagaagatgataccctttatcttcaattgaatagatctttttatctggaagatctaactgcggaacaatttcaaaacttactagtttctctttctccatcttactaagttcgcgataaatttgggtatgatgcgcagaccaaaaatggatcatcgtttctctaaattgttgtgttagctcatatccagttgatggtttctttgtgagtaatccaagaagagcatatcgtaaagccatatcatcatttccttttcagcaatttgcttcttctccattataaacgtctttacaatatctttgcacatttgaagttgcaaatccacatttgacaattatttcgaattttattttatcagaaatgataagaaaacgccccccggataatatgcttatacattgctaagatgaaatttgataaaataccggacaattcaaaaaagcaggctgtctatttcgactgcctgctttttcgatggtttaaactattctttcgtattgatatttagtaatccttccgctgttttacatgtctcgttgccaaaagaatctttcactttcacttcgatctcagcaccttcagccaccacattcgaagtagctgtccagtaaccgacataatgcccttctgatacttcaatcattggaaattcagtcatacttgaaggcatcatcgttggattcactagcggcatacgaattgagaaagtagcctttattcctggagcgctatcgaattcaattttgactgattctcccgcttgaagatctttattttgatctggttttaattgattaatgaccaattcttcttgctgggaataaacgttgatcgactttttcgttttatttcctgctttgtctttcgccactacttttataatgttctcaccttgctcgagcagcatccgatgtgaaaatgcaccatcttctactttcgctttcgttccgttaacctttacccaagcaagattttcatcatgaacgtcacctttaactgttacggatcctttatttgttttccagtcatctttaggagatgtgatagttaattccggtctcgtttggtctaaagtaaccattacagcatcagattcttccgtcatcccacgatcagttgatgcacgagctgttaactgattttcaccatcgctcaattggatttctgttgtgaaatgaccttcttcattagaagttgtgacagcttcttcttcgccatttttcataatatgaacgtctgtcattggtgcggtttcaccgtcaatttcaatgctattcttgtttgtatacgatccgtcttttggagatgtaatcattggtgctgttagttcataatcaacgactgcacggatcatatagttcccttcttcttcaggagccttcgaccatgcgccgctaacatattgccagcttcggtcgacatattctccgtcttcatctgttgcaaggcccggagcatttggattggcatccgcttgaatataagtgatataaaaatcaccttctacgatcactccttgatcagacagatcaaccatcgtccattcgccatttcgaagagcagtcgcgtcaattggaccagcgagtttcttacctggtgctccatccggacctgatgcatcatgaatttcgactttaaaatttgtgccgcctggatttggccattccgtattccagaatctaaataaccctccagttacaagagcgcgttcttgaccttctgcaagcgacattttcacagcccaaccgttcccagcatcatagaacgctcttgcgttctcagcagtaccatcgtcatacccgatttcccctgcatatccgatgaatggggaaagttcagcattctgtacaactttctcgctcgcttccacagtgacgttaaatgtttcgctatagtaaccggccgcaagaacttttaacgtatactccccttcataacctgttactgaataatgtccttcttcatccgtttgcacaggtgctatagcagcatcttctactaataaaacagttgcatcttggattggctctcctgtttcactattcgtgactgttccttcgatttctccctctggtattgcttctaatgtgaagtcagcttctgtcacttcatcatctacgatcgtcacttcctgagtctctgactggtagccatatgcttctgcaatagctgtgtagtcccctgctgcatgagtcatggaaaagcttccatcttccaagttcgttgttgccgagcgccctgtctcaagaatagacacttctgcttgaagcggcagagcttgaggtgtaggtgatggtttctcttgaactggatttacaacaagcggtgaaggttttaacttgtcaggattgactttttctttcgctttggcactagcagatttttcatcaggctgaatagaaactttcgcgctctttttcttagcggcgacttccatcggctctgctgataaacttacatcgtcaatataccagccctgcttcatcacgctaccatccgtctcgacgtgaaaagctaaataaattcgctgattttcataggctgatagatcaacctcttcactcacccattcatcagaaagattattatactccgcaagagcttcccaattttcctgatcggttgaaacgaagagatgaccataatcatagtttctttcaagttcataccattgattgaattgaagataagcttcaccttctggtaaatcgataggaggcatcatcagcgtcatgttagcactgttgtcatatgctccatcaaggttggttccataaaccttttcaccagagtaagcttcaggaccaaccgttggcgtcccccactcccatgaattattttctccccagctcatccatccagctggctctgattcaaagtctgtttcgtaacctgttgagataccagggataatttctacctgatattcgtccgttgtgacaacatgtccgccatagtcttcgattttaaacctgtaactaacggaaggttcactgacggcgtcacccggaataatagcttgataggatccagaaagatagttcccatcaactcttgttgcttcagttgacgtcaactctccgttatgagcatattcaagctctacactcattacgctaacattatctgtcgctgtgacggtaagaggaaggtccatctgagcataggcttctgaaggagcatcgtgttgatacgtgggctcttcttcatcgcttccttctttcatcacatcaccttctaatgtaccgagcccactcataacagaagaaacggcgtcaaatgcattcactaatccataaccgtaaccattattcggagaatctgggaattcatcgtctgtaagtggtgtgacggtgtttaaaaagatgtcttctatttcatcaaccgtcaacgatggatctgcttgacgaaggagggccgcgatcgctgatacgtggggcccagccatcgacgtaccattccaccctccttcatagctactccctggtaccgcagaacggatattaactccaggagctgaaacgtcaggttttatttcatcatatggggatggtccctgtagagagaaactcccaagagcatcattgatatctgtagctcccgtagcaaatgactcaggataatttgctggtgttgcgattgactctggacctccgggattaaatagtgttgtattaccagcagaaaattctgggaatatatctgcatttcgccagttttgaaccattgggcgataccattcgtcaagcccaggtccgcctccccaagaattgttcacgacatcaggagccttttcagggtgtggattgccttcagcatccttaggagcaataacccattctcctgcttcaagaagatcgatatccgttccaccgtcttcgctaaaagcttttaccgctatccattttgccccaggagcgacgccaatctcgttcgaaccatccggttcagcgccaaccattgttcccattgtatgagtcccatgtgcgagatcatcatatggggcggcttctccgcttacagcgtcaaaccagttaaattcatgatccaccccttcagaactatatcctcgatactgttccataagagcgggatgatcccattgaacaccggtatcaatgttagcgatcaccgtccctgccccatcaattcccatatcccatacttcaggagcacctactcgatcaatattccactcaattgagttcgtatctgcagtcgttttagccttagttttcgttttatctggtattggctgaatctgcctgatttcgttaggaagtattttatccacttcaggaaatgatgctagctggttcatcactttttttgttgcttttactgccataccgtttacgatgtaaaatgattttatgtcttctgcattgccttttttctcttgttgttctaagtatgtggacacagagtgctgtgtttcaatagacgtagctcttaacgcattaacaacagctgatcgcttagtgatttcagcttgaaaggaagttaagttgtttttcttagctttttcttcagcttctttcgcaacttttgtcgtatcagcttgttctgcaaatttaatcaggaacgttactttttcgttcttctcgaatgctttcgataccttctgatcaatgcgtttcacttcatcattcatggatacagaagaatcacttttcgcgttcgcttgcatcgctggttgcatgaagctcgtgatgaggagaataaaacaagcaaatagaactacgattttacgtttgcttcgttttctcaacatatttcctccctatcattggttttgtgtttactctctgccctccttttgaattgctgggttcacctaacatgctataccagaatttgtcacattcaaatcaaaaataacaaaattttcagaaaataatccaattctctcaaagtacttttaatataaaaaaattacgattgtcctggatgtgtgtagtattttgatggtcgatatcgtttttaaatagcctttagcgtataaggactatagaagcagcgaacctttctttagtaacacgactatgacgaattccctaaacctcttttttattccattacgatatcagcataaaggaggacttttctcaaataacacgttattgacatgccataaagattgaaaaacgattctcatttgtcatctttcgctagtaatcgtgtcgtcaacccctttcttttcaacactaaaatccgacagtgttttctcatgcccacttataaagtcgcggtctttttgtatgaattgatgcaaagatcaatcatgatatttccacataaataaccctctttcttaaagaaagagggtttttgacagtctttttcatatcgaggaaaaagggctagtgtacttaaccattcgttttgtatgtgttcataaacttttgatcaattcgattttttaatttccatgatagagaatgatggagcactattttcccatataacagtaatccctgtttgttcccagtagaaagaatcgataagtaagtatttttaggttgaaaacgacgaccattcgtccctttcataaaacctttaatattctcccaaaggacctctgattgtcgcacggctactacacctgctttaggaagattcggatactgctggatagaagcacaatctcctgccgcaaaaatggccgggtacttcttcacttgtagtgtatcttctacaagtaaataacccgcttcatcaacaggtaattgagacgttcgaaataaaccaggtgcttttggaccagttaaccatagtacttcatcataagcaatttgattaccagttgttgtgataatatgacttgacgttacatttgccactttttcttgcaaataaagtggtaagcttttatcttgcataatttgcttgattttttcctgtgctttagctgaagtgttttctaacaatgaggaatgagaaatgaccgaaacaggttttttatcctcaagttttcttctcgcagtgagagctaaagccatttcaacacccgcagcgcccccacctacaacgacaggtttttctgagtcctgcattgcctttgctacttcttcgattcgatagttaggttttacccgaagagcatgctttctagctccagggacatcaattccggctgttaatgagccgatatcaacagaaagcacatcatatgagagtatatcgcctttttcggttaacacaactttcgcttctgcatcgatcgataatgctgcaccatccgtaaaatgaatgcctgctgcttttgctaatgttggaatatgtactcgcatatcttctttgttatacagaccttcgagatatcccgagaacattccagaataatattgatactccgatggagaaataatggtcacttcataattttctttttttttctgaagcttcttcatgatgtgaagatgtgcatgtcccgctccaatcaacaacaattttttcaaacttctcctcctctgtcctctgattccttatcgaacccatttaatgtatttttctgataccttgggaagccaaccatcaaataatttttctctccaaaataaatcggcagcttgatttaaaatagcacctttcgttgggtatggatgaatgactgtagaaatgtccccgattttatgaccatgttccttcgcaaaaacaatttcttgcatccagcttccagcatcttctccaacagcatgagcacctagaatatgacccttcatgtctgttattacctttagaagtccattttttttgcgctcagctataaatcgatcgacatcttctgtatcaaccttgaaaacgcgaatttgatcgccatgtttctctttcgcttccttctcagtcattcctagatggaacacctcaggatcgatataagtaacccacggaacgttctcatagcttacttttctcttcaacccaaataccgcgttttgtacgataagcttgccttccataccagccgcgtgtgtaaaaggaaaggcgccattcacatccccgattgcatagatgtgtgattggcttgattgtaatgaagcgttgactgtaataaatccattattctcatctactgaggctgcttttaaatttaatttatttgtattaggctttctgcccgttgacatcataatcatttctgattggataattttctcttccccattttcaacatacgtcactactttatggccatctttctctttaattcctttaacttctgctttaaaaacaaaagaaagatctttctccaattccttcgtagcaattggaataatatcatgatcttcttttttcaaaatggtctcagaggtttctaatatcgttacattggagccgaatcttgagagagattgagcaagctcaagtccaacaggaccaccacctataaaaacgatactttcgggtaagtgatctaaattgaaaatcgattcattcgtaatataagagacatgttccactccgtcgattgggggaactttcgggcttgatcctgtggaaatcacaattcgtttccctttgatcgggttctcgccattaatgagaactgtatgactatctttaaatgagcctttgcctcggtaaatgtctacccctaatttctcaaatcgttcatcgctatcaatttcttgaatttcatcaatcgcttctttcacacgttcgattgcacgactaaagagcacttcaccactgaccgtaagtccaaactcttttgcgcctttatagacagcatgaacttctttagctgctgtaataaaggcctttgatggaacacatccaaaatgaagacaatccccacctaaaccaggctgatcatcgattaaagccacattggctcccatattagctgcaccagatgcagcagtaagtccaccagaacctccgcctattacaattagatcatattctttcatttgttacatctcctctatcctaatatcctttttgcttctattagtctttgaaaagcagtaaatagttcaattgctacaaacgctagtgttaaaataactaaaaagttgtgaaacaaaaccattgctgtaaatagaataaaaccttctgttctttccgcagccccagcttgataatagaatgatttgatgccttttttctctgacactgcccctactgtaaggaagatcgtcatggcaaaaatgatagaagtacttaataacaagagggcccacattgcttctggaaatcgaaaagcgagccctaatatgacactaatttctacaacgcgatcaaaacttacatccaatacggtgccaaaagcagatggctttgttttccgagccattgttccgtccacagcatcaagaaaacccgaagcccataaaacaataacagcccaaacgtaataatcaagataaataaatatcccagatgaagtaccaataatgaatgagataactgttacttgattagctgatagacctaaacgaagtagcgaatctgaggtgcgatccattagaggctgaacatattttcttgcatgagtgtcaagcacgacagcaccgtccttatttcagttcttcttcaacagaaggtccaaatgcttttctgcgaatatataaacttacgagtagtaatagaagcaatactgcagcagcaataatgaccgatgaaatattatttgataaaaaacttgcgccaagaaaattcaacgcaatggcgcctggtaacattccaagcagtgttgctaaatagtatttcctccgactcacattagaaaccccacaaacatagctaactaaatcaaaatggagaaaagggacgagacgtaacaagaggacataaagaaaacccttttccgataatcgtttctccaggttttctcccctccgcttccatgattttggtagaatattcattcctaattttcttgctaatgaaaagaaaagaagagctcctattgaaccacctaccacagcaagaactgtaccaagtatgggcccaaatactaatccaccactgatcgaaatgatcgaggtaggaaagagcacaaagggtcgaccaatacaaataatcaggaaaattaatggggcataaaagccgaatgatgaaatccaactacgaatataagaaggtctaaaatcaaatacatattgatttagtaaataaattacaataataagtgccgttaacgctaatccttttagaattgttttactagtcattgagcaagtccccattgatctttctgatgggaatattttttcatttcttccctcttagcacttaacagaacctcttggccagcaactaaacggctatctgacatagcaagaacacttccctgttcccatgatatacgatagcattctatgttatttttcactgtaaccgcgcttacctttcctgaaacaaaggtaaaatcttggttactaggtttattttgcagaggaatagcttttaatttactaagcggaataaacccttcttctagagccaaaccttctccaataattttagcactctccatagatgaaggatttgtgacaacatcaaaaggaagaccgatttggatgaatcttccctcaaacataacagcaagtctatcgcccatttcgattgcttcgtcgcggtcgtgagtgataaacagtgaagtaatcccttcctctcttaataaatccttcacctcaccacgaagtgattctcgtagagcagcgtcaagtgagctaaagggctcatctaataaaagtagatctggtttcagcacgagagctctcgcaagtgatactctctgtttttgaccacctgataactcatgtggaaaggcatctttccatttaaacagcttcactttttttaacattcgttcagcttgcctcacacgctcggtttttgctactttttttcttttcaaaccataagtcacgttttctaatactgttaaatgaggaaataataatgaatcttgaaacatcaaaacgaccgatcgattttctggtctcagtctcacaattgacttttctcttaagtaaatgtctccttcatctagagcttccaaaccagcaagacacctgaggagagtactcttaccacatcctgatggcccaacaactgtaaaatgttcaccttcttcaagatgaaacgaaaggttttgcaaaatgggtgtatttgaaaatttcttatgaatatttctgcattgcaatagctggttcaaaacaatcttcctttcaaacgcgattaacagctcgaataaccagcctcatcataacttccaccaaaccaataaataagaggggaagcaaagcaaaaagaattgaaaatcctgcaataactgcttcattcgaactcaaaaaataaggataatataacaatgggagggtaatcacattacctccaccaataatagctgttagcgcatactgtcctaaagatataacaaaagttaaaagcattaagcttctaaaacttggtagtaataaaggtagtgcaattgtaaaaaaacgcgttaatggaccggctcctagtacagaagcttgctcacttaaactacttcccatcctctcataccctgccctcatgacacgaatcgcataaggtagcgtaggaatcaaatgcacaatgacaacgcctatcatcttatcagctataccaaattgtatcatcgtaagttgaagtcccattgcaagtaaaatgccagggattaaaataggagatagcaatagtccttcaataaatgatttccctttaaacgtatagtgggaaagagccctagctgctggtatagcaagaagtagatttaataatacaactaaaatagcaaccttgaacgttgtaacaagtgattcgattaatttagggtctttcataatgctccgccatgcatctaaacttacttcgtttggtaataacgctggccatctccaacctacagagacgcttttcaaccctattgttacaaagggtaggatgaataatatgataaacaaaataagcatgaaaccagttgctaactctcttttccctaaacccttcataaataacctcatctgcttctcccctttatcattctaagcctatgtttttgcacagctccgattgaaagggtggcaagaagaagggcgaacacacctggaaaaatcatagctgaaaaagcaagtggccgcttactccaatccccattatagaaccattcgtacgctctgaccggaagcatttctggtcgtgtgactcctaataagtatgggatttcaaacgcagaagcgacaaatgcaactaatattactgaagtttcaatgagaacgggaagtaaccatggtaattcaactgttttaaaagcatcccaattacttccacccagcgtacgaacgacttcagaatagcgatgatcgatctcataataaacaggcaaaagcatgagaattacaaaaggaacttccttccatacatatgttaaaatgattccgattccaaatttctcttgaacaagaactggaaagtttgctcgattttctaatgcacctatttgataaagcagagaagaaagcagtccactttgcgaaagaaacaggaacactaaataacctgcaacaaaatgcggaattaacatcggtacccatacaagtagctttgacgttgaatctttaaataattcatataacattcttgtcattattaatcctatcactaacgatagtaaggttgacagaatagcaactcgaaatgttaatttaagagaatggaaaaaagcatgactactaaaaagttccgcgtatgccgctatagtccattctccttctattgtttgaaaactttgagctactgctgaccacgttccataccctaccagtaacaatgtgaccgcaatcgccggtaataaatataaacttaacttccagttattgctcaataatccgcttcgcccattcattattaatccactccgtgtaacctgtatctatgtctggtagcttatattcatttaagacttctgtagaaagaacactttctcctcgtctaagattttcaatcatttgcttatcctcttcactcaatttatcgaaatttaaaaccgttccttctccccacatcttaggatccattttagctatttgagcttctggcgactccaaaaaattaataactgtcatagctccctctggatttgggctattaaacggaatactgagataatgtgtattagtaatcgagccaggatctttcagaacaaatgacttcgtgctatcaggaaacgttccattctcaatcaaactttcagcccttgcttcattaaagcccatcgtcattaagatttcgccctgactataaagcgtatcaagtttggttaatgattcagggtatgtttcaccattacgccatagatcagacttaatatcatccagatagttccaaacatactcctcagagtcttgaataatcttcttgtcaaacctcttagatagaagacttgacttttcacctgcacctttcatgagaaggtgcttcacaaatgtattgcccgtaaaatcagaaacgttaggatacgtaaacttcccaggattatcgtgaatccactgttttaattcaccaagtgtactaggaggtatctcgactttacttgaatcgtaatgaaaaacaaactgaacatttccccacggagcttctaaaccatcaatctccgttccctggtcatagttagcattttgatcctgagctccaatatattcttgaaaatggggcagtttgtttgaaaaagaacctagtaataaatctgcattcttagcatttttaaagtttgatccattaatccatatgacatcaatcgtaccctcatttttgttcgcttttttctctgtcaaaagcttttgcataaattcttcagtattcatcggttgacggttaagggtaatattgtgtttttcttttaatcgtggggcagcccattcatcaatgtattgattaatcccttcatctcctccccacataaagagattgacctttgttcccttagaggaggttacgatttcatcccactcctttgacaatatctctttgttaccagtttcattggtttcactattcccacacgcaacaataaaaagtatcgctgcaatgatgaatgtaatctttcgcttcatctcgtttcccccttgtataaactatcctagcaactgaaagacacatttgacgaacttgattgtgctacatacgcatcaaccaactattttcccctattattatacctttttcaaaaacatgatgctgtaacgctccttacaccttaaacattagtaaaaccacttcatttagaataagatttttaagtttatcgtaatatccaagaagaaaagcaatagccaaatggctattgcttgtttagtgggtatgttaggctacccgatcatctatttaccttagctattatgcatttttctacgaacaatcacaccggttgctgccattgttgcaagaatcgctgcaacaatccattcaatcggcatttgctgttcagctgtaccacccatacctgttttcggcatgtctgttggcattgcttccatagcgaatttatccgggaattgatctacaaaagctcctgataaaccttttgcaggcatatacatatgtgcgtaagcttcacgaacagaatcataagcagcatcataatcttccatcgtatagttatcaaaagcagaaattagctgggtaacatgcatttgaagcccttcagataatgcacccgcttctagtcttccttcagtagctgtttcaaggaagcttgagaaatcagctcgatagttttctaatgctttcatcgctgcttcttttgcttcttcatcttcagctcctgttgcttgaacgtactcgacaaagttgccgatatgtccagaccacatttctttaaattgatttcctgcttcctcaccataaacggaggtaatggcagctgcgagatcatccgtattctcacttaatgcagcagcagaagcatcgaaatcttcagatccgtcaataccgttttgcatcgtcatcatagcaagcccagcatgctcagataaaaggtgacctagtgttgcacgaagatccgatgctggcgttacggcttttgtattttcgaatttatccggaaactggtcagtaatagctccagagaatcctttagcaaccatttgcatgtgcgcaatagcctcacgttctttgtcataagccatttcataatctccagctacatagctatcgaatgcgcctattaattgattaatgtgtgcctgaagtccttcagataacgtatcggcttctagacgttcaccagttgcattttcaaggaacatggagaaatcttctttataaccgtctaagctatctagcgctttttgttttgcgtcttcatcatcattccctgtagctttcacgtaatcaacaaagaatccgatatgattactccagatttcattaaattcagcaccagcttcttcaccgtatacagatgtaatcgcagctgtaagatcttctgtattttcacttaaggctccggctgaagcttcaaaatcggcagatccttcagcaccttttctcattgtttctactgcaagataagcgtgctcactaagtaaatgaccaagatctgcacggagatcagctcctggtgtttcaactgttggcttgtccatttgcttctcgtgatcagcagcgaatgctcctgcagttggtattagaagcgaaaaactaagcggaacaattaaaagcccttttttccagtcaatcactttctttttcatattcttgttcgtattcattttcaaatccactccccttaatttttgatttacacttagctaacggagagaagattattttggatcattcttatttatatctttttgcaatttctgttttattcgataataaaaaatcagcaaacccccttaacacgagggtttgctgatttttttagtttattatatttttttaatcactaggaatgcagcccttatcactgacagcaaaacctcattatctagtattcattggtttttgataatttagtcaaaatcctttttctcccattcgtcttcaggtatacctaaatcctcaccagaaaaacgttcttctttaaatggatcagcatgattatgaaaaccattttgttcccaaaaaccaggtgagtccgcctcaataaattcaatccctcttatccacttaatacttttccaaaaataaaggtgtggaacgactaaacgtaacggccatccgtgtttcgctgttagcttctcaccgtcgatcgagtgagcaagtataacattatcttctaataagtcggtaagatgaatatttgtcgtgtaattatggtctccatgaagcataacatgattcgactcaggcttaatatcgagttcttttataaagtccttcatcaatacaccttcaaacgtattatcaaagcgagaccatcgggtaacgcagtgtatgtcacatgtcaccttcttctgtggtaatgcaagaagttcatcataggaaagagagacttcactcgctacatttccaaacacctttaagtcccacgctgtcatatcataattcggtacatctccttcatggagaatagggaacctttccgttaatacctgtcctggaggaagacgatctccatacttttcgtttgctttaggtactttcattttccgaatccggtctactttcttcatagacttcacacctttcatttttttcatatgtaacaaaaaaactcttcccataaaggaagagttcagtctttaacagagctccccctcatcttccagagctaaagctctgctggaattagcaccttgtttatcaggttgccgggcatcaaagggccagtccctccgcctctctcgataaggaaaaaaacatgtaattgtgattcattctatcggtaaccttcattaattgcaattcttttctagaggggttgatctcaaatctactaatctagttctttctgcatcttaataaaagggtaaacccctccatttgtatgttgttgaaaagaatcaattttttgaaaccctgctctttgatagactttaattgccctctcattaaagtctgcaacagacataacgagtgatgatggtctatacaattcaatcgctttttctatgccagcttttaaatacttatatccatgaccattccctaccagacctggactcatcccaagtccgatttcaacttggttacctgatttaagaacgtaactaaaaaaacctatgagctggtccaggtgataaacgctccagtaatgtggattattagctgcttcttcccgaaattcatacaaatcttcaggatcctcatccatattataaaatgagtaaaccccggtatatttccacgaaatgacactcgctacatcttgctgactcatttgtttaataatatagctcattttctccctctccttctttacccattggaaaagccccatgccgggaaatgcatggggctcacactttatattttaagggggacaggaaccggggaagttcctgtaaaaacagtgtagcaagttccaggggtatgctgattgattatgagttgtttttcacattcttttaataaatgaaaagaacgtggccaactatttgtaaaccatgatagtttgaagttcacgaaacccaatgtctttataaatgtattttgcgaagttagaggaatacacattcaaacgaatctcctcatatccctgttctttgaaattttcaatactcgcttgcacaagctgcttagaatacccctttccacgaaacttcggaaaaacaaatacatcataaatgaaaccatgtttgctttctgtaaagtaatccgtgttttctccaagtagtacccaaccagcaatttcccctttatcccgataaatgaggtggtaaccgccacgatcaagtatggaagatacaatttcaagtgctttctcttcttttacgatacctggatttgtcgttccttcgttaacagactgaatggaattagacaaaatataatccctttcttcgattgtcgctcgttcgatcacactatttccctccatcgccaaaaactttcgttaatcgttaattctttataaaagaatctagttccttcttattaaataattcctttattacccaaacgatcaaatcatcattgcactactagctctaacataggataggtgacatactttactcgatcgttatagcataaacacaggtatcgtttaacttagtcctatctacagattgactattattttttaaaatcgcctcaagctgaaagaaacaacgttctgctacctttcgactttgccaattctctgcattgcaacgaatttcaattcttttcgcactaagttctcgaatcgcaaattcaacaattccctgaacagcctccgacatatatccctctccactatagttcgaatcaatccagtaaccgatttcaaacttacgaacgttccagtcaatgcgatgcaaaccagaagagccaatgaacacaccagatagtttatgaaagagcagcagccgtaagtcttctctttttaagaaagctgcgtgagattctcgaatatttgcttcaacatcggcttctgactgatcaatatgcgcaaatggcatataaggcttaagttcgcttaacgatgactcaatcgactgatgcactgctttaccatcacctggcgacggataacgaatatgtaaacgatccgtgtagaattcattaggaaaatcaagtagaatcggctgcatgaaaaagtcctccaaaaactctaaaagatgtcagaattataccattaatgagaaatctgtcaaggaagacaccctttttccaggaccacaaccaacgtcgagaagagttcctttgccatttaaatgaaaggtggatgtaagatattgaatcacttcctccggtacagtggtctatatttcgaataatatggggtagctcctttaaacaagtctttatacattttcccgcctcctatatactaaaaattagatcccgttgaaaggagagtttctgttggatgttacactcattttatcatttttaggagctgccgttctcttaacaatcatgccaggtcctgataatttatttgtgttagctcaaagtatcactcaaaataaaaaagcaggtattgctacctccctagggctttgttcaggtcttctcgtacatatttcagctgcagctgttggaatatccgcgattctttaccaatcttcatttgcctttactatcgtgaaattaattggggctgcttatttactgttcatggcttatgaagcattcaaagagcgaaacgaatcgtcaacgcttcagaatcaaccatctcgaacttatatttctctatataagaaaggcattgtcatgaatatcttaaatccaaaagtttctttgttcttccttgccctcctaccacagttcattgatcatcaagctggctctcccactcttcaaatgtttttattaggtttggtgttcattgttcaagcacttattatttttagtcttattagtttttattctggaaaactagcaagctatattactgggaatttgacgttgttaagaagatttaatctcactaaagcagcgctactcgcttttattggtgtccaaattgccttcagtaaaaactaaaaaagcagcgcctccagaaagagaggcactgcttaacattttcgtttttcaaatgaacgttattgagctgtatacccgccatcaataagaagagcttgtccggtaatactcttcgctgcatcgcttgcgataaacattgagtagtcggcaatctctttcacttcaagtagtcgtttttgtggaacaagagggtagataacttcttccaataccttctcaagctctactccacgttctttcgctaaatcttccatttgtcctcttacaagtggtgtatccacatagccaggtgccatagcatttactgtaatgccgtgctctgcaccttctagtgcagatactttcgtaagaccgatcacaccatgtttcgcgctgttatatgcggctttaccagcaaaaccaattactccattgattgatgccatgtttataattcgaccaaatccttgttccttcataattggaaaaacgtgttttgttgcaataaatggagctgttagcataatatcttgcatcattctgaatttctcggttggaaaatcttctaatgcagaaacatgttgaagccccgcattattaataagtacatctaaacgaccgtattcttcaacggtacgatcaatcgcttgtttgatttcatcttcacttgtaacgtctgctttaatcccgataacttcatagcctttatctcgaagtttttgagcagcttcctttgtaccctcttcatttatatcagaaagaacaacatttgcaccgtttgctgcaaatgtctcaccaatttcaaatccaattcctctagctgctcctgtaataaatacagtcttgttgttaaccatgaatcgttcctcctagtgtaaatcctaaatttattttcattctcacacccctccatttaccctttacaacaatttataaacaagttccatctcattttttcaacttcacgcttttcgttattttcaattaattcaccacaaatatctaccgttatatagaggttcttaagggcataggaacgagaaaatctactgtttgatcgaactacattttgggtactgaaaatagacagaatgatccaaaattggaaggagatcaaaagaaatgacgttacgccacgccctttttataatcgttaccatttcaacttctggttgttctaacatagctgttttgaatcctaaaggctctgaagcacactcagagctaaccttactttatcttagcttagccttgatgagcattgtcttacttgttgtcttcactttacttacgcgttttttaatgaagtatcgtgagcgtcctggacaagaaaatgattttcctattcaaattgaggggaataaaaagctcgaagtaacctgggttattttgccgattgttattttgattattcttgcagtcccaacattcgccactacatatcaacttgataacaaggcggagagcgttcatgaacctttagaaattaccgttacaggcaagcaatacaaatggatattttattatccagaacaagacataacactcgaaaatgaagtgaagctacctgttgatcggccggttgtcttcacgcttcattcaaacgatgtgattcattctttctggataccacaactaggcggcaaaaaagacgtccttcccaaccaagaaaacaagttaacactaaccccccttgaaactggagtctatgacggaaagtgcgctgagctttgtggagcgaatcacgccctcatgacatttgaaactaccgttattgaacaagaagcatttaatcaatggacgcgtgttcatgacaaacaggaggattaaataatgaatgcgatttttgactacttcttatcactaccttcagatattatttttgcagatctctcatttactattatgctgattgccactgtttatttattaacgaagtatgcaaaatggaaatggctgtggagttgggttacttctacagatcataaaaaaatcgggattatgtatttatttgtttcgtttctcttttttattcgtgctggaattgaagccttgcttatacgaatgcagcttgctttccctaataatgatttctgggtatttcaaggagagcggtttaatcaactgactagtactcacggtacagtcatgatttttcttgttgctacccctctactgatcggcttgatgaatgtgattgttcctctccaaattggtgcaagggatgttgcatttccttttatgaattctttaagtttgtggttattcatttcaggtggcattttgattaatgcaagttttgtagcaggaggctcacctaatgctggatggacaacgtatgctcctctagcactgaaagaatttacgcctggtcccgggaatagttattaccccattggacttcaagttgctggactagggacaattatgggagggattaattttattgtaacgattattaaaatgagagctcctggtatgcgatttatgagaatgcccttatcaacatggtcgatgttcattacgtctatcctcatcgtgtatgccttttcggctcttgccgttgctctactattgctgacatttgagagactatttgggacagttatcttatcagcatcggaaggcaatccattaatttggcagcaccttttctggatatttggtcacccagaagtttatatcatcgccctacctgctttcgggatattctccgacgtcattagtgttttttcgaagcgaaaactttttggttatccctctatggtattcgccattatacttattggatttctcggtttcatggtctgggttcatcatatgttcacggtaggattaaatacgaatattaatatcttttttgcactaacaacgatgctaatcgctgtccctactggaattaagatatttaactggctatttacgatgcgaggaggtaggattcgctttgatacacctatgctctatgcattaggattcatattcacttttgttatcggtggcgttactggtgttatgcttggcaccgttccagcggattatcagtaccacgatagctactttgtcgttgctcaccttcattacgtcatcattggcgccactattttcggagtgttctctggtgtttactattggtggccaaaaatgtttggaaaaagactgaatgaaacccttggtaaatggaacttttggactttcggtattggatttcatattaccttcttccccatgcatgttatgggcttgatggggatgccacgacgtgttttcacctacccggaaggtgatggcttgggctttcttaattttattagtacgtgcggtgcttttatgatggggattggtgtattatttttcatgataaatatttacataacgacacgctatacgagtaaaaacttattaaatgacccctggttctctagagggcgcacgctcgaatggacaatcccgtctccacctccagcctataatttcgctcgtcttcctgaggtaaagagtcgcgagccgctgtgggatgcttatgaaaaaggaaataaaaacatcgactttataggtgaatacgaagatattcatctccctaactccacttctcttccattctttattggacttggatttctaattgcttcttttggtttcgtattcgagatatgggcagtggctctatcagggatgttaatcgtttttcttatgatgagtattcgatcttttcaacgaaaaaacggtattcatattcctaaggagaaggtaagggcacaagacaggaggggtgacgaataatggaaacgatgtccgttcaaaagcacctgaaccataagcaagcacagatgaatatccttgctttttggttccttatcggtgccgaaattgtggtatttggttgtttattcggcatttacctcgctgttaaatccctaacaggtcaggggccagccccagacgaattatttaaattaaatgaaataatgctttcaactgttgttttactaactagtagttttacttgtgcaattgcggtttattttctaaacctttctaagaagttatcgactcttctattctttcttatcacgattttacttggcttagctttcattggattggaaataagagaatttattctttatgtagaacaaggcgctaaaatttctaccagtgcttttcttggtgcattctatctgcttcttggcactcatggcgttcacgtcttatttggtgtcacctggatttccttactattagtccaactttggctaaaaggtataaatcaagaaacggccccaaagttatttatcgcgagtctttattggcactttatcgatgtgatttgggtgatgattttcactattgtttatttaataggaaaggtgtgaaacaattgaacaagtatgataaaaaagagattcgtaaactcttcctttcgttcatcctaatgattttattaacagctttagcttttttccttgttctctatcatctcatttcaccacctttcttaatagtttttatcatcttctttgctctcattcaaatcttgatccagctggatcgatttatggatatacgtgaaaaagaaggggaatatcgtttaacatctctgataggtggaagttttgttgctctccttgcgatcatttttttaattcttctttaaaaggtagttttatgatttttcacaaataaaaatactccggagtgtttaacgctccggagtattcttgtggaaatcatagcttgctgcttctcttttcttggaaacacctaactctttccctaataataaaagcgactggttaattctccagatatagtacaagtcattcacaaatttttttacttcttgatcttcttgtgcgatgttttctgaaagaccttcaatatgttccctttctttatttaaattgtacatgattaatcctgtctcaccttttagaagtttcagtaaggtaagaatattgtgtttcattacttcctttactaactgaagcgttttttctgatcctttgacaatagtcgaacgactgttacgattcgtagaagcaagtaaatgcttagcaaaataattaatcgccgtaagaacggttaaccagcgctcaattcctgaacgagctagaatagcaggtctgttacgaagaggccttgcatcttctgctattttcctcatctgttcgtcaataccaaacgcctgattggtaaaatcatagtgtttctttccatctgtaaaagattcaagataatcagtaacgtacgtacttaatttggttaaaaaatcttcagcggtatttgcaaccttatcacgggtgcttttcggataaatgattgcagcagcaagaaacccaataaaggctcctgcaagtgtatcaaatactcgagccattagtatctgctcagtaataccacccaatataaaatcgtacataatcgcgatcagcatcgtcatccaaaacatcatcatagcataggaaatggataataaataaaaagccataaagatgcagcaaaacaacgcaattaactcaaaaataacctgacccgcaagaaggtgtgccagtccaaaaccagcaatggcaccaaaaattgtcccaagagatctttgaaatgctttctggagagtcattcctacggtatccgtacctaacaaaacaacaaaagcagagagaagaacccagtattgatgagcgggagatagaaaatatccaaggaaaatcgccactgctcctgctactattgcctgtaaagcttttattgttgcagctctcggctgtttcgccttttcttctgtgtttacgttctctttctttatttcttcaacgtcttctagtcgctctttctcctcaatgtttgctatccgtctttctccgagctcgattgaactatcaactagatgattggcaattgattcaatccttctaattagccacagccagtctttattttgatcattggaaactctcagttcaattaattgatttttaagctcttctataacgttctccgtttgctttaagtttccgacaatgtcatgacttcgcaacacttccgcatctcgaactgattctacaagcttatacagcagctttctaacttcattatgctctagcgcgtgaagttctttcattcttttaactgctggataaagggtttcaattaacatttctgcatcgaatacgtacattcttaattgctctgtgtctatacctggccatacttctcctggatctgtagttgttaattgactggatatgacctgagcatattcatttaactttttgacatcacgttttaatagaagcgccctatagcgatttggagtaggatctgcaatcgcatcaagaacaagatcaagcgtaaggtttgtttggatgtggaaggagttcatacttcgactaagttgtcttttcggtttgtttttgataaggataaagtgataaagataagaaaaaccgccacctaccagtatcccgataataaatccaggcaaatcaggtggctgaagatttaaaagggttgaaaaataaatggataaaaaggcgatcataaagataccaaaatatcgaaagccataatgctgtaaatagtaagcaaaaaagataactagtaaaaacaatccatctgtcataaaggggatcgaactaagataagttcgcacagttaaccagatcatacttgaaataactaacaaaaacgcagtgatttttttctttttatctgtgtcatcattcacaagcaataatgacaaaagactcacgacacctgcaagaatagccggtgtaaaagacatttcaagtagtgccgtcaaccatagcatgaacataacggatgaaaaaacgctaattgtaattctcgctgcttgatgtaaccttgtcctgccggggtctgcagcagctaaacgagcccaccagctttttatgatcgattttttatttttagtcaacataagttaatcatatcgaaaatacattcattctgccaactttgtgtatcaaatttttacttttttcttcttttggctatttgtcttatcgcctttgaagacttgttatgcctcctttttgatcattaaggagcttacttttttttactacattgcaatagaaaaacctttgaagaaaattcttcaaaggtttttcgttaaactgtttttaaatctttcttcgcttttactttcttttccgtagttttctgctttctaggaacttcttcattaaaggatttaagcattccccaacacgtaaatagaagaataatagttagtggaaaggcactcacaataatcgcagtttgcatgctctcaaggccacctgtcaccattaaaaccactgcagaggcagataagatgaagccccagctgaatttcacgaaatttggagggtttaagcttccattcgtcgtttgcatacctaaaacaaaggttgcggaatcagcagaggtgataaagaaggtagagattaacaatagcgttactacggttaaaatgctacctaacggaagttgctcatataaataaaataaaccggtctcaagactttgacctgctatatccgttccttgtgtaaagtcaaagaaaataccagagccaccgaatataccaaaccaaaatgcacaaacaaccgtaggtacaaccgtaacagcgatcataaactctctaatcgtacgtccttttgaaaccctagcgataaacgttcctacaaacggtgaccaggcaatccaccatgcccagtaaaagatcgtccagttctgaatccatgattcattgtccgcgttcatcggtgctaatctcattcccatcgcaaatatgttttgtacatattcaccaaacgtggtcacaaaaagatctaacacaaatttagttggacctagaatgacgaaaagaatcagaagtactacagcaagagccatattggcattacttaaatatttgattccttttttaatgcctgtcccagctgaaattgtaaagagaacggtaataatagcgataataatcaattgtactgtaaagttattcgggatattagttaagtagctcaaccctccattgatttgttgagcacctagtcctaacgaagcggctacaccaaatattgttgcaaaaacggctacgacatcaaccgtaatcccgatcgggcctttcactttatcccctataagcggataaagagtggcactcattaatccaggcgcccctttacgaaatttgtaatacgctaatgctaaagcaatcgtggcgtaaatggcccatgcatggaatccccaatgtaaatatgtatagcgaagggcaaggtgtgcggattcaaccgttcctccttcaccatatggcggggtagaaaagtgggacatcggttctgatactccaaagaacaatagccctattcccatcccggcgctaaagagcatggcaaaccaggtgagcctactgtattcaggcttatctgtatcctttcctaacttgatatgcccgaacctgctaaaaattaaataaatagcaaatactaaaaagaatgttgcagcaagctgataaaaccatccaaactgatccaaaaagaaattttgagataccgtcataacctggtctagattgccaggagagatcacaccccaactgacaaaagcaattgcaattgcaatgcctatccaaaaaacttttgtaactttgtgcattctgtccactcctattattatttatgtggatctaaaaatatttcaaaataataaccacatgttcttaataataagcataaccaagaatgttttcaaatttttataagaatttagtataatatacccctttcgcatttactacaaacaactgtgttctttccacatatattgcattctcatactaataataaccaatatccttcattatttttttctctataaaaagcagaggcaatcgcctctgctttttggaatctataaacctgaacttaatacaacttttcctttaggtgtttcacttttactatccggctcgagtgtgatcgccacagcatcccagtcgtgatctccctcatattcaacctggtaagctacttcacctttaccttcttgatttggggtaaagaaaccggctcgataaggcttgtcaccttcaagcaaccaaacctggtacacttgatcaccttctgtttttgccacgtcgttaacctcaaccactaaattcatttttccatcttcattcattagagcagcagatcctgccgatgcttctgcttcagaaggctgtaattgaaccgctttgatcaaagaggagatttcttctggctgtgtggtctcatcttcaccttcatttacgaatgtataaatatttcctgctaaagaaagaaatagagctgctgctaaagctggggctgcccactttttttgttttgactttctctctgtttgaagattggttacgttatttttttgttcaactgaacgactttcatttgcaatatcatttgattcaaccgtatcactttcaaaaacgcttgccagaacgcgttctttcattccggcaggcggctcttccgggatggagagataaggaaggtcacctgtcaattcttccagctcctttagctcctctctgcactcttcacatgataagagatgagtttcgaaccgctctctttcttcgtttgataaggttccattaaaatagtcgagcagttgttcacaatttgctttcatctgagacccctcctttctcaccgagactggtttttaaatgttttaacgctagccgaattcggcctttcacagtacccagcgggaggtcgaactcttccgaaattcttttatgggtcatgcctttaaaataaaacatctcaattattttcttctgatcaccttttagttttgaaacggctgtgcgaagtatctgacctctttctttccactcaacctggtcctccactgatgcttcatcgctatgcaatgcatcacgttcgtctaattcaaagttgggctctttcgactgcttacgtaagagatcaatagctgtatgtctcgtcatggtaagtagccatgacgaaaactttcctttctcttcactatattgagcctttcctttccatagcttaataaatacttcttgcatcacttcttcagcaagtcctccatcttttacaattcggtatgagaaagaatataaaagtttttcatatcgatcgtaaagagacgagagagcttttttatcctttgcctgaacctgattatacagctcggcatcgttaagttctctcatatcattctccttttcattaaaactaacgctagcctgaagaggcagaaaagcttatgtatagctaacgttacttagtctactttagatgtgttcttcctgaaaaaatttcttagaaccgcatgagaccgcttgttaaatcaacaaaaaaacggttagactgtctcctttaaaaaagccttcctatggaaggctcacgcttcttcaaataacccaagtgaaaggaatgcagcgttaacggctgatgaatgaccacctttaacatccaattcgagcgtctgatcaggttgtaaagaaagcgctaggacaccaagaagacttttggcatcaactacccaatgttcttttttcaataagatcgtttcctcaaaacggcttgcagtattcacaagttgactggcagtttcagcaaaaactggttttaacacttttaacttcatctccgctctcctcccatttactcgtaattctttatctaattcgaattataacataactgtctgtgtccataatctttatagcttttttagagtgctatttcgtgatcaatctacctgctttttcatctacgaaacttttcacttgaagcttgttcctgtatgataggaatgattagataaaaaagaggtgacgtaagatggctaataaagtagcacttataacaggaggcacacgtgggattggtaaagcaattgctcgaaaattcgcttctgaaggatacaatcttgtacttaactttatgagaaagaaaaaagatgctgaacaaacgaagcaagaattagaacaagaatacggcattactgtacatattgttaaagccaatgttggtgaggtgaagcaaatttctgctctctttcatgaaacagaagaaacatttggccgactagatgttttcgttaataatgcggcatcaggtgtattaagaccgcttatggagattgaagaaagccattgggactggacacaaaacatcaatgcaaaagcttatttatttgctgcacaagaagcagctaaaataatggagaagaatggtggaggagcgattgtagccctttcaagtcttgggtccattcgagcacttcctaactatgttgccgttggtgtatcaaaggcatccgttgaagcaatcacacgatacttagcggttgagctatcaccaaaagggattgtcgtgaatgctgtgtcgggtggagctgttgatacagacgcactgaaacacttcccgaatcgagaagaattactagattccgcgaagaaaagaaatcctgcaggacgccttgtcgaaccaacagacatggccgatactacttactttttaacaaccccagaagcaagcatgattcgtggccaaaccattattgtggatggtggactatccttacttggtgaataattatgtagaaagacagcggacgttccgctgtctttttactattatgtacattcgctatatagctacatttttacgagtaccagttacataaaatcgaaaaagtaacgaatcacatgaaagaaaacaggcgaagtataggcaaggctgtctaccctactcaaataactctcgtctaaagctttcgactttttgctatctccaagtaacaggtcgcgtttcaaaactgagatggttaaacttccaagaaaaccagcaacgctaattaaaatccctgagaaaacaccaaacaaggaatcaaatggtgttaaatatggaaatagtgtataagcaaacgcagttgttgctattaatgaacagaaaaaaccttctaacgtgatgtaaggatttgaagaaggtacaactttcctctttcctgcatatagcgatacgacataatgaaccacatcatttacttgagttaaaagaactaggaacaaaacaaggtttgcaccataatcaggagaagcaatctgaaaataagctagatgacttaaaccaaaaaccatcagcattaagccccattgcgtcgaacttactgatctcaaaaatccgagcgtacccttcccaacaatacgaggcagtggaagtaataagaaaacgtatacgggaataaaaacgatgaacatgccataccaatcgatgaatatccagtagaattggataggcaccgccacatatgaccataaaaaaattcttcgatcagcttttcttgttttcatcagggagaagtattctttcagcgcaaagaaacttagaaccattaacgaaaacagagaaacgattggattaaataatgtggccaaacaaaagactccatacatcccccaccatgttttcacttttattataagccccgtaaaatccttattaggttgcttttttctcacaataacaaaaatcgtctgtgcagatagtaaagcaaataatataacggtcagtgtccatactgtactttccagaaaggcacctccttaccatgattgaaatgttatgtataatgaaggaaaacgtcaaaataatgaggagtcgattatgactcaaaaagtatacattttactttctgatacaggaactctctttacaaaatcgatcaaaaaatataccaaagctccatataatcatgcctctcttgcattcgatgatcaattgcatgatatgtatagctttggaagaaaaaaaccgagtaaccctctaaacggtggatttgtaaaggaaaatgtcctcacaggaacataccgccgatacccaaacacaacatgtgtgatctacgaattaaatgtttccgaacgtgatgtgattaaaatgaagcggttactaacaaccttcattaaaaataaacaacggtttctttacaacattcttggtgttctcggtgtctcaatgaatgaacctattgagtttagtcattcttacttctgttcgcagttcgtagctgaagtccttcatcgttcaggcattgaactttgggataagcttccagcacttgttacacctgacgattttcgaaaatgcgaacgactctccctcatttacgaaggaaaactatttgattatgaacctattaaaaagcaattattgaagtaatctcattcttatcactttccttatatgggtgatttttacacaaacacttattaataaggacagattcggttagaatctgtcctcgtttggaacgtatattacgatgtgaacgtttctgttaaaacaggtacaatttgttttttacgagaaacaacaccttcaagtactgccaggttttcgattaacgttacgttaaacgccttttctacttgtccagcttgctttcctaatgcaagcgctgtggagttgtttgtcaaaatgtccgttactacaagaaggaatagatcgaggtcttttgcttcaatcgttcttctcatctcttcttcgaccacgtcctgacgtgcaaggacatcgagagtatcaacaacgtttacctgagctacttcaaccttagcagttcccattccaaattcttttgcatcgagtgaaatgagttctgctggcgttttgctgctcatatctgccccagctttaagcatttcaagaccgtaagtttctgcatcaacgcctgcaattcctgccagctcacgagctgcagcgatatcttcctccgtacatgttggtgatttaaaaagaagagagtcagagataatcgcagaaagcatcaggcccgctatatttttatcaatctgaatgttgttttctttatatagcttgttaagaattgtcgccgtacaaccaaccggttctgcgcgataataaacaggatcagctgtctcaaagtttgcgatgcggtgatgatcaactacttctaaaattcgtacgctttcgatgtcttcagcactttgttgacgttcattatggtcaacaagaataaccgcactcgcttcgttagaaaccgtttgaaccatacgaggagcttcaacattgaattgatctaatgcatactgtgtttcaccattaactgcaccaagacggacaggctctacatccatacctagtttactttttaagtctgcataaacaagtgcagaagtgatcgtatctgtgtcaggatttttatgtccaaaaatcaatactttttccattgttcgactccttttgaatgaaaagatttatgtactcaatacatattgtaaagatctcttcctataaactcaatattatttcatattattctaacaagaaaagtaaggaaacggattcccacataggagaatccgttcttaccttataaagaatcaatcgctttactaatctcatcttctcctgaaatgagatcaaacgagcgacgaatcgtattctcttttgttagtgatgtaacaacaactttagctacatcttcacgtgagattgacccgctaccgaggttttcagcgattgataccttccctcttccgggttcatttaaaagtccacctgggcgaacaattgtatagtctaatttactcacttctaacaatttgtccgcgtaatgtttggctgcatagtacggcaggagtgactcatgccaattttctcgattgtgcgcctgaagggcactaatcataacataccgtttaacacctagcttttcagcagcttctatcgtttttccagctccatctaaatccactaatagcgttttatcggatcccgtactcccacctgaacctgcggcgaaaataaccgcgtcacttcctttcatagcttcagaaataacttcaaccgagtcttcaagactggccacttcagattcaattcccctgctagctaattcatctgcctgctcttgttttcgaaccattgcttttaaggaatggtctttgttgctatgaagaagattaacaatgttttggccaacttggccgtttgctccaataacgagtacattcatcataaaacgctcctttcaaacaatctatgcccattatttcaaaccctttttactatcgcaactaaccagcttgcttcttcaacagtgatgacacgttacgacgatctcttgtcatagaaaaaaccgctgacgctagtcctagtagtataaacacccctccaacagttgcgttcatttccactgtgtactgttcaatagcataggcaccaacagaagatccgagggcaataccaagatgaagagccgaattatttaaactttgttgaatatcagatgattcaggtgccaattcgattaagtagctttgttgagccggtgtaattccccagcttagcatactccaaatcaccataataataagaaagagtgagaaagagaacgtggtataagggatgataaacatcgccacagcaaaaaccataattgatattagaatggttggccttgtaccaaagcgatcggaagcaactccccctaatcctcctccagcaacagccgctatcccaaagatcagataaacaatacttacccaacttcccgataatccaagcgttgtttttaaaaacggggtgaggtagccataaagcgttaaatgacctgttagaaacagaaaagatgttaattgagcagttaaaatacgtttatccttgagtgttttgatttgcttacgaattggaatggctggttttggctgaattttttccataaacaaagcaaccccggccattgctaatacagtaagaccaataatcagaacaaacggagccttccacccaaaagcatttcctagcattaagccaatcgggacgcctaaaacaagtgatgcactgattcccataaaaacaacaccgattgctcttgcgcgatattcctgtttgacgatgtttgatgccatagtaacgcacaaaacaactaaaagagacccacttgctgcagaaatgatccttgctgccattaacactgaaaatgttgtacttagtacagcgatgaaattacctacaagaaaaataacaagcgataagagcgtcagtttttttcgttctatttttgcggtcatcgataatagtattggccccatcaacgcaaacacaatggagaaaacactaattaacaggcctgtttttcctagactaatctttagatcgtctgctactagatcaagaatgcctccaataattagttcaaccatcccaactacaaacgaaacaatggtaagtaaatacacgcgtttattcattattcctcgcactcctttttcaaaagttaccactaaaagggtaactcttttcaagtgaataagcaataggaaaatgaaggtcgcttttccccccttaaacggttgtgctatcattgaaagaaatgaccagtagaagcaaggagaatagtgacatgctacagcagtttggatttacgcaatacgaaagccaggtctatgaagcacttattacaatcgatgaggctctcgacgccactgccattgtcaaacgttcaggtgttccacgatctaaagtttatgatgttctgcggcgtatgagtgaaaaaggaatggtattagagtcaacgacagaaaaaaaacggctctatgcacctcttccacttgaatcagcaattaagaaacttcagcgtgactttaacgaaaatataaccgaattaaaaacaattcaatctcgtgaaaaaaaagctgatgatcgcgtttggacacttaaggaagaacagtccattcactccctcgtctcagaactccttcacttatcatcttcttcaatcatcttttctggttgggcggatgatatcgagcaacacctttctttattagaggaaaaagaagctgaggggatagcagtggaaattcatacaattggagagatttattctaaccttaaaaacgtcactacactaataccagacacagatcaccaaaaactagagcgaagtcgaattgtcgtcattgatcataatgaaattttgtttgcgggaattgaagaagcaaattggcaagcgatccatacgaaatcaaaaccgctcgttactttcttcactgaatttttctatcatgatattgcgctaacagaaatcacccgaaagtttgggtccaccatgatggaagaccccgacattcggaatgtactgctaaaattacgttattgatggtggcccatcatcttatctagtaaattaacaaagcttcttatgtagcacatgacgcacattttaatgctctttaagactcctttcacttctacaccttctaattatttcaaaaaaatccccttccatgatttatggagggggatggttaacgatcgcttattcggcgtttagcatttcttctcttttcttacctaattttatctccaattcttcttgtagtaaagccatcccctcttgactgagcacaatgttaccattaccgaaagtttggttatcgtctagaatttcacctgtaatcatacaggccatgtctgcttgatacttctgtaatatgaccttgttttcacttgtgaaaatttcaataggatctttcacattaatatctaacgtacgtcgcagttcttttggaatgacaattcggcctagttcatcaatttttcttaccacaccagtgctcttcatcctcattcctccctttcgttttagcgaacgtctctctatttcttttatcataatatcgataacattattatgcaacgtttattgttccaaaattctgtaaattttcattatttcttactatttcacagaactttccttttaatgatgcaccttcacaacatttagctgaagttcgctatcctatctgcataacctttaatagttgcatctatcatcgtttagggggtaaactaataatgtttagacggtaaactagtggaggtaactaaatggataaaaaattatgtgaagccgttgagctttttgaagaagtcatcatgtatgggactgaacgcattattcgatctttcgaacatcaattatttgaagaatattcttctgaacagcttcagatgcttcaaatcatctcgaaatctggtcgtatttcacctggaaaactcgctgccttacaaggcgtacataaaagcgcgatttccaaccgttacaaaaaacttgaattgaaaggacttgtaacgacagtcgattcagaaaaggatttaagaggaaaagcgatcacgcttacgcaaaaagggtatgatgttgttgctttatttaatgaagttatttatgaacatgtcgaaaacatcgtattaaatgattttcatgaagaagaaataaatgaattcttgcgtatctttcgcaagttaagttcaattttaaaagcagaaggagatgcaaaatgagacaaattttaaaattcaaatggccaattgccattgcgcttattgcgctaaccgccgttttatttattttatccccaaacctgacaaaacaagctgaagacgccggaacgtttcaactaccagaaaacgctgattctaaaattgcagcagacatactagaggaagccggtgcaggagatgaaacgatctctcttgtgtttacttatgatcagcccgtcgaagataaagcgcaacagacggtttcttctattgcagaagaacttgaaggagaaggatccctcattaaagatgtgctcgatccttttgaaagtgaagaaatggcggaacaactcgtttctgaaaataggcaaactgttctattgcctattacggtggacggcacggatgaagaagtgaatgatctagcaaatcgtattcgggaagacatgattccagatgatacaacggcatatgtcacaggagaagctattattaatcacgatgtgaacgaaagcgcccagaaaggtcttgagcgtactgaaataataactgtggctttaattttcgttttattacttgctgtttttcgttccattacaactccctttatcccattatttgcagttggtattacgtatctccttagtcaatcgattgttgcgtttcttatcgattggattggttttcctgtatccaattatacgcaaatttttctagttgccgtcttgttcggaattggcacagactactgtatccttttgttaagtagatataaagaagaattaactgagggacattctgttgaagatgcgattgtaaatacgtacaagacggccggacgtactttattaattagtggattagccgttttcattggttttgctgcgatcggctttgctgacttccctatctttaaatcagctgttggggttgctgtcggaattgctgtgttattgctcgttttatttacaattgttccattctttatggcattgctaaaagataaattgttttggccatctaaacaatcagcgtctcataaagatagtaaactatggaccaggttcggtcgtttctctataaataaaccgatttggtcgatgctcgttgttgccgttattatggttccactccttttcacatacgacgatcagctgtcgtttaatactgtaaatgagattggtagtgactatgaatctgtgaagggccttgatgcgattgaggaaggctttggtaaaggagattcgcttcctgtaaaagtgatccttcagcaagatgaagcaattgtgactgaagaattgcttccttatatcgaaacaatcagcaatgacattgagaaaaatgaagacgtagattctgttagatcaattacaagaccagccggagaggtcattgatgatttctatgttgattcacaactttcccaggttggcgatggtctaaacgaagcaactagtggactaaatgaagttcaaagcggattaacggaagtacaaaacggattggaccaaattaacggtcaaatcccttctggtagtaacgctggaggacttgaagaagcagtaaacggattagggcaagtgaatgatcagcttggtgccatatcacagggacttcaacaatcccaaaatgtagctgcagcttcagagcagctcgggcaagttcaacagcaacttggacaaattcaacaagggcttgcgggcgcctcttccgatctgcaaggtcagtcaggtcaggtttctgaactaagcggtggcatttcggatctatcaaaaggtgttgggtcatcgattgatggactgagcgaaataaagaacggcttacaggacgcggcagatttggtaaccaatatgggggattccaacgcacttcgtgatacgggtgttttcattccgagaggaacgcttgataacgaagattttgaacccgccattgaacggtatgcgttcgatgaacaaaaggcagttacgcttgaagtgattttaaaagaagatccttattcgactgaggcgattcaaaccgtacgtgaaataaaagagaccgtctcacgctcaatcgacggaacaccacttgaagatgctacggttgcttatagcggggtttcaagtattaatagcgacttatcagacatttcaacgagtgattttacaagaacggttatcatcatgcttgttggtttatttattatcctaactgtccttttccgctccatgattatgccgattgtgatgattggatcgcttctacttacgtactttacatcaatggcgatttctgaattaatctttattaatctattaggatatgacggaataacgtgggccgttccattctttggttttgttatgctcatagcgcttggagtcgactattcaatttttctactcgaccgatttaatgaagaagcttcgattggcattatggaagccatgcatcgatccatggctaaaatgggtacggttgtcattactgctgcaattatattagcaggtacatttggtgcaatgatgccttctggtgtactgagcttaatgcaaatcgctacgattgtaattactggattgctactttacggtctaatcgttctacctcttctcattcctgctgttgtggtgtcatttgggaatggtatttggtggccgtttaaacctaaaaaacgataagcttcaccatacaaaagctcagagcgaaccgctctgagctttttaaatctatttataacttcttcatctcgactgacctacttctcttccatacgtttttaaatacaacttctcaaaaatctcaatcatttgataaaaacgcttattatagttatcgccttctactgtccatgatgtagccagtaccgtatggcaatagccccaaagtaggaaacgctccttatctagattaagatcctttgttaagatgtctacccggtttttggttacttcatagacgtctttctccggaagccgattcaaaagaaattgaatcaaatcatactcaacttcccctattaacccttttgggtcaattgcaatccaagcgtttcctgaagcaagtacattgtagtgatgaaaatctccgtgtagtaacttgtactgagctattgattgattcagttttgtaaaaaggcttagtgaagtcctaagtacatgcgaagaaagtgggccatatccattctcgttctgcactatagtatctcgaagcgacttctctctaaccgctgttgtttgaattcgagtatgaattggagctggtatagataattttttcatcactagtgcagcctcacgacaggccttctcatcgttttctattgtcgcaagcgtgtgaccaggaaataatttatctaaaatgatgatccctttttctttatcaaagtcaataacttgaaccattccatgttgattaaacaagcgcaaagattccagttcatcaaggaactctgttcctggtatacttagtttcacaacaacttcttttccactctctagcttagctggagcaacataattgatcgagagatgataaggatcctccattttcagagaccatttttgttcacaataacggatgatttgcggtaatttctgtagccatacttttccttctttcttaaaataaaagcaaacggattgaacaaactgctcttgaaacttcatcatacacctctcctactaataaagaaataaagtgcagtatgcgatcaaaacgccgataaaaccacacatcaaactatacgaaatgtttttcaagacaattttataaggattcattttcaaccctacggaagttagtgtaacgataagaccataaggagctgatggaacggttgcgatcgcgctactggcgagcagaatcgttaacgtaacagaaggaaaagcacttaacaatagctcacttacgccgccaaagatccccattgtcgcaatgggatgaacgcctaataatgtcattattaaaaaagtagcctggatgaaaagcataatgtaaacttgatgcccttcaagtgccacaagggggtcctgtaaatatcgtaggtatggagacgcatttaacgtttctgtgaaaaaagatagcgttagcagtaaaacaatgaaattatgtaaatggtttgtttgccttttccaattgggccagccaatttgaaagaaacttctttttcgtttcaacaataatgcccaaatgtacgcaaagggaaaaagggcgatcgtaacagcaaacaaaaagttgaattgaataatgttggttagaaaaacgacaaccattaagaagagaaccagcgccacgataaattccattaacttcttcttactactttcccctaattttgaaggcgtaccaacctcttctaccacttcgtttcgaaaggtgatttttccaataatagaatcaaatgcaaagcctaataaagcaatgagcaacatccaaggtaacacttctaagtaattagcatttgtaataaagattgatgtagctagtaaaatttccaatggactccaaagtaacgctagagaatacccccttaaagtcgacatggcgataaaacggtttctgacgtttgttttggatttttttaattgattttttaacagatcttgtgaaatagttgcagacgataaattcaaaaaggcagctagagaaaccatagtcgcttctcctcgcacatataaatctcccattttcttcacatttcccccgagtaatgtttgcaatagcttattatatctccccgcttttacaacgctattcatccatggaagcatggataatagaaacaacaaccctatattccctgcgaaaaaggatggaatcttaacgaggctaatatcgcttgaaaaataaaaaaagccccctgcacttaaaagaataattcccagtatttggaaaacgcgatccgcttctttgaaattaatgacgatcatcactattgctaatagtccaattgttgtataaagagaagcgtttgaccaaaagaggtggatcacatccaatagaaaaatgaataaataaaaaacgtaaatatgttgaaacagtctagtattccacatgttattctcctatcctataggcgaacgatgagagaatgtgatcagttcgtctacttttccgttgttagtttgcttccctaatcctatcgataacctctcaaattttcaagaattccaaattcttaatctacaaaactctatttagctaaccttctcaaactatgggcattctttgtctttaatttgtttaaactgtaatcaaaaaaagtaccgcccgatttacggacggtacaaaagggggaaaattatgttagtttaaatttacccctttttaaaatacctaaacctttttttctaaaaatcttttcatttatttctcgcttatgatttgactcctgtttctagtgacaaactctcttgattcctcgtgttctaaaaggcttaataacgcttgttcatgaacaaaacaaatttgattaatttctttgtcgttcgcttcaaggtccttaccgtcgccaacatattcgaaatgaaacattgtcgttatttggttatgataaccgattttcgtttgaattttttctggaaatgcaaatgagattggttcattaaatcgcttctttaatgtgtaggcgatggatcctgtttcttctaataactctcttcttattgaagcttcgactgtttcatcttcgtcttcaacgccacctttaacgaaatcccacgttccattgtgaagctctttcccgattctcgtatttatcgtgactttgcgaacgatgagaaagcgacttttgtgcgtaacaattgcccccacagccatcctagttttcataacaatatcctctcgctagtttgtcgcatactcactttcatcaggtctttgaccattctgtaattggcgcatcgttaaaccaaaatccatttgcaagtgaggatagtctttaaaactactccagtctcctccccaatcaaaaccaagatctttcgcaatagcgactacttccatccaatctgattttccattctcgttatcgtctcgctccatatcccaaacaacatcaccattatctaacttcaaagcaaaatcgatcgctagaccataattgtgataagacccgccgccggcaacatttgtaacgacttgtcctttagttgaccgtcctttttcataaagagcatcctgttcttctttcgttcggtgtgcagctgtaatcacaatctcaactcccttatcggtagctcgattgatcaacgtatcttttgcttcacttaccgttggatgcagctccgttggcaaaggaacatccttttgaataaacattccctcgagatcatccttgaagttgatgaagataagaccaattcctattatgaaaaggaaggttataagattgaatcctttcaaaccgaaacctcccaccttattaatctaatattttgatcataacataggtggaactaaggtgttcgaaatggaggcttcataaaatttgtaagcttctcctcggtggtttacattattcttcttaagaaaccaatttcttcttttcgtcactctgcataccgctaacagcccaaccctagtataataagaatcacataaccgctttttatccattccctagcaaaaggagacgcttatgaaaagattagtaattgcaaattttcttcttataatctctcttatttatcttatttatcgtattacgaaaccaagcttatatctccctgcattctctattgaagcagaaaatcctgtcaaacttacattcactacgctcaccatcgatactggtttcgttaccggtaacgccggctccatctactcaatttggttaattccaatctaccttcttatttcaatcgcatgcgtcttaacgatttctcccttgatttcaaagaagcggtaaaactatttccctaatgaaaatccttcaaacaagcgacctccgtatggttgtaaagcgtcatcaacaaacgcaatgacgctttccttttcacgtgtttgataataatgatcaaacacgttgacaaacctatccgccagtgtttgatcatagtttcttaatgcacggacaatccatttagatgagccgatccactgattattcatccgaagaataaattcatgaacttgctctgcaagagtagccgcacagcacatttcttcccctcgatcggtagcgccaataaaatcttctaatacatctgtaagaaaatagcgttttagcgtcatctcgttttctccccatggggatggccccttttccagaatcatactcgcttcatcctgcagtacttttgcctcccccttgtcattaagaatcacgccttcagacaccattttcggaagtgatggttttgctcgggcacagtcactctcataaaaggcataatagctttctaaattatgaacataccactccaccggccacccctcatagaaaaagctctcccgataggaagcagttaccgacgaatcaaaaacgactatatcaagatcagatgtagctgtcgcttcccctcgaacaacgcttccagctagaaaagcagcctcacattcgggggatcttgtttgtactagattcttagctatagaaacgatgagttgtaatgagtccattttccaacctccattttgatttttttatattttgaggaaatattactcaagattaggtaaaaacgatagccttattatctaaataactaatagaatgagagctaaaacaagccagcaagtacccctgctattttttctttgacagtcaaaagacacaatcctgctctctccaaatgcaactaaatttaattgaaatcttcgttaacgtataaactctagagctccgttaccaattatttcaaatcagtagggatatctcaatcttttttacgtaaaaaggagcttatcttatttaagataagctcctttttattagaagagagagatagcttttttgcttttgactcagtcctgcttcatgtgctttttattgacgatggaacgattatagactttaaataatgatagactccatcatcatcacatgtaaattctgtttcatcgtcgacgatttcttttatttggtccgatgcatttttcattgctactgcataatcaacaaactggaacatcggtaaatcgttgttactatccccaatcgctaacgtttctacatccgacaaatcaaaatagtgtaacatttcctttataccagtggctttgttcacacttgctaccattacttcaacattatgagcagaagagattgaggttgtaaaatcgatgtcttgctttattttttctaactcatctttccatcgattgatattctctttcgttctagcgaagaaatagaatttagaaaacttatttccttcgatctgacttttccagtcgatagcttctttgatcgcttcttgacgtgaaagccattcattcagcccaacactttctggctttggatctttgatttcatcttccataaatatacgatcttgttgtaaagcgatacggtccgctccatatgggaaaagttcataataaaccttatgttctctcgctttttcgataaccttttctactaattcaagagggagtgaatgttcaaatatggccttgccctcaacataccccgccatcccatttgaagagataatcccatccacctggaatccatcaggtacaagttcgcttatttcatctgcagctctgcctgtcgcgatgaaaacataaagtccattatctcgtaactcatcaataatttgtttcgtaagtccacttaccttgttgttgtgatttaagatcgtaccgtccatatctaaaaaaatagcctttggctttgttaccatagtgactccccttactgtaataaattctacttttatttttttataccttatatctcacttcacttttaccgatcttccaaaacttcgttcatcaactatgaaactagtagtaaccagtacaattattgttacaaatcggagcaaattgcaatgggtgtttattaacaaataacatgttactcctctttaattaacctgttcaagtttttgataccaattttcataaattggcatcattggtttgattcgttatttcaattaaaagagcctatctgatagcagataagctccaaaatagctctaaaactaacttttaataaaaccgtttttaaagaacccataccattcttcgagttctttactttccaggacatctaatttccttaatatatctctcgaaaattctaatgctccacttccattagctgtgattaaacagccctcactaatagattgttcatttatgtagttttcttcaccttgataattaggtgctccttcttttaaatatgctaatgaattgcctgtatgtttgtttccctataattttatcatctttaacaccctacagaacttatttattaaaagcgattacactttactgcaatccccctcttattaatttgcttcttcatataaatattgtcgctatttatagcaataatcggacagacgttcacttcatttctttttagaataggggatgaggtgataatgatgtacaaaagattatggcgaaacaaaaatatacggtattacttacttgctggaggagtctctcaacttggcgatgttctttccggaatggcttttttatttttagcgtacgatttaactggttccaatcttcacactacaggaatggctatggctgagaccttaccataccttctatttggattaatgggtggcgttatggctgattggttacctaagaaaaaattattagtttatctggacctagctcggatcccattcattctttctatcgtatttttgcattatttggatgcacttacttacgcatatctattaatcgtgagctttctgatccagagtataggatgtttctttaacccgacccatcgatctgtactaccttctataacgacggaagaggaacgaacgaatgcgaacagtttatatgatacattaactcgaggagtaacggtcttaagtccgtttatcactctatggttgttaaacacctttggtgctatacactttttcaccttagacgcaataacctatgccgttagcgcctttttcatctttaaaatacacctgaaggaccctaaaccagtcgttaataagacgattaaaggtgtctatcgctcaattctcgagtttacctcctgggcgaaggcgcactctaccgtcagacaactatttctttttacttttgttacggtttttttcaacacctgggtgtgggaagtaggacttttgcttgcattatcagaaatgagtgaacaaagtgaagaattatatagcattttacaaggagtatttggtggcgttgttattttcacaaatatcgttttgccatacttgattaaaagaatgactctacgccactacttaattggagcgttgatttggggtacaggaattacatactacggactcttatatgatattaagcatttctttattggttgcgctatcgtaggtatagggctacctattgctggactagctcgcgtttatcttcttcagacacttgtgccagaagagaaaatggggcgcgcctttagttccaatgctgtcttattatacttttctaacaccatttccttaggagtgtatggattcttagtcatgttcatttcaattcaacacttaatgattggtagtgggttactcattgtcattctatgtattggagctttacttattaaaaccgtgaatccggcgaaattctgttggcgtcttccgatacattttcttaaataactggttataggaagagacacttttaaacccttgattaagagcgatcgaaagaattggatcattggaatgtaataaggagtattgacttcgtaatagacgataaagttgcaaccaagaataaggagacagacctagctcctctttaaaaaggtgagcaaattgatatttatttaaccttgcaacctgagccatctcgtccagtgtccagtcctcgctatagctttctttaagggcatttgtaacatcattaattatcgctttactactgatacttggaaagtcaatttgatgagaccctgcaccatattgaagcatcataatggaaagttgggtcaagctgttatctagaaaaaactgattcgcaactgatccagctccttcatttagcgataagaaatctctaacaaaaatcatccattggcttatttgaggatgtttataagaaagcaaagtaaattctggggatgctgctctaatacccaatcgatcagctgcctcttgtagcaaagatggctttatctccacaagaaatttctcttttgtagccctaagttgtttatgatcttcatatgggttaaatattagaaattctcctttatcaatggagatgtccccatgatttgtttgataagatcctctcccgaatggagaaaagattaatttataacattcatcacttctccaaatccgctcacctaattggtcattacggataagtaatagcccgttctcgttatctagtatcattagttaagctcctagtacaataatgagttttcattggtttatgacaataaacccttcacttaattatgagaccttgggaacatactttagaaattccttctatatctgattcacttatcaatacttatttctaattttaacattttacggaatctgtttttctagtactaacggttaaaacaaaagtacattatctctccttatttcacaaagcaattcttacttatccattcattttttggtaaacttttgaaggaacggaataccttaaaggaggtacgaatgtgaaccggattatggtaatgggcgcttcatcgggatcaggtaaatcgacatttgcaaagaaactcggtgaaattctagactatgaggtttaccacctcgacgctctgttttggaaaccgggttggattgaagcgagtcttgatgagtttcgtacttcccaggagaagattgctttaacttctagatggattatcgaagggaattatagcaactcctatgacatccgagtggcgcaagctgatacgattatttacatacatgccccgcgactcctttgtctttaccgggttttaaaacgctggatcactcatatcgggaagacacgatctgatatgggcaaaggctgcaacgaaaaaatggaatggtcttttttaacatttatttggacaacctactatcctcgtaaggaaaagatgaaaaagagatttgaaaaaattcaacaaactactcccgaaaaaaagattattcttttacaaaacaaatcagaaatagcgaattttcttcatgaacttcagacaaagcatacaaatttgtgagaacccatgataagataaagtgcagtacgtttgaatcctgattttcctgtttaaactagaaatactactgaagcacatggaggcattatgctaacttttgaagaaaaactagagattattgaatcatcctttcctgaactgacccgaaaagacgtttcgcttggacgtgtgaactttcactatgaagaagcggttatcgataagaaaaatgttgtttatcatcttcacccgaatgggaacggctatgtatttggcgatcttattgaaggatatccattagatgaaagaggtatggttaacattcgtgatttctcaagcaatgagcttcgaaaaatcataggtgagtccatccagtctctttctgtccttcctgggtcagacatcgaaattcaaacatgggtaaacgatgaagatcaaacgcttgaattaatgtacgagcctgaactcgagctatggaatgtctacgctggcgatattcttgatggcacattcccttctcgaaatgaagcggttcaataccttgatgaagaaggatttactagaaaataatcctattagccttacgcttttaagcggaaggcttttttcatatctttagccaagcgacttataaaaccctgttgattttcccaaatagccacacgcttcatagaattgatgtgcagctcttcgttcttcgcggttcccactgtttaacacgactgtggaagcccctttctcattagcaaacctctcagcttcacgaattaacttccttccgattccttgctggcggtatttttttgctgttaccatcgtaataattcttgcgacaagaatattagcgacatacgaacgttcataatgcatgccaagcatcccgagtagatcctttttttcttctactacaagggtgacatacagattgtcattcataatcggtagtagtcgatcttgcacttcatgtataggtgtttcatagcccatatctgaaagtaagagagtgattcctagctcatcaccccttctcgccttccttacgttcatcttgccttctcctctcgtaaaccattatttcgatatcgttttgaaacttgtttttgtgaaaacaatccgaggagtggtacgacgagcacaagcaaacttactactccaccccacccaaaacgatcccacaataccccaacacctgaactgcctgcagcgacacctgcataatagctaattaaataaaaacttgaggctccgcttttatgatgctcggctgtcttagctacggaagcagatgccattgaatgcgcgataaaaaaaccagcacaaatgatgcaaagcccaatcatgacaagcgttattgaatgataaatgcttagggctactcctactaatagcgtgaatagcccgatgatcatcgttctacgaagaccgatacgtgaagagattcttccagcaatcggaggagaaaccaccccaaggatatacgcgaaataggtaaacgatatccatttcaacgaaagtgtaaaaggttctgcttccaagtagaagggcaaatatgtccaaacgcctgtaaagatcacttgaattagaaaaccaagtgtaaagagagacaataatcgcttgtctttaagatggacaaacattcctttcatatcatgagtcatacttctacttccgccgttaaaaaaacgagatgcaggcagaagcaagtaaaaacaaaccgttgcgacaagtccaaaaatcgcaagggagagaaaacctattttccagctataaacatctgtcaaatatcctgttacgacgcgaccgctaaggcctcccattgcattactggcaatgtaaatacttgtcgctaggccgatgttgtaaggctcaacttcatccgctaaatagcccattgctgatgctggtatacctgcgagaaaaaatccctggacacatcgaaggattaaaagaagtagaaacgaattcatcaacggcattagaagtagtaatcctagaacaaaaagcagcgatactttcatcaccattgttcgtccatagcgatctgatacaaacccaagaataagaagacctggaatcattgtgatcacgggcaatgacatcagtagacttgatgttgtaggcgtaatttgaaattctttcacaaatataggaaggagcggttggaaagcatataaggaagaaaaaatcagcaatgccccgcaaccaagactagctgctgctcgccaaaatcctgcatcttttgatgtataacgctgctccctatttagttgatcgaccactgtatcatcaccttcattcttttatctgtttatttaaatttagtaggaatttgagttagatcgatgccccacacgattggcatataaaaataaatcgctagcgtgatgatcacaacagatgttgcgttaagccagaaccctgcccgtgccatgtcaggaatttttaaatacccggatccaaacacgactgcgtttggtggcgttgcaaccggaagcatgaatgcgcaacttgatgcaatgcctgccccaatcattaaagcatacggatgtacaccgatcgctgctgacaaagatgccattattggaaacatcattgttgccgtcgccgtgttcgatgtaatttctgttaagaaaataacaagcgtcgtgacaagtagtaaaataacaaataaatggataccttcaagaacggttaactgctcaccaatccacttcgctagtcctgattcttgaaatccagaagcgattgcgagtcctgccccaaagagtaagagaattccccacggtaaccctttcgcggtattccagtccaacaaaaacgatcctttgttcgaaggtgcaggaataagaaacaataaaatcgctgctgtcatcgcaataatcgtatcattgatgtttggattaagctcacttagaacaaatgaacgactaatccacgcaagtgctgttaatgaaaaaatcgataaaataactttttcttctaccgacatttttcctagatcagccttttccttattgataacttctttaccacctggtaattctttaatgttcattggaaaagccattttcactaggtaataccaacatccaattaaaagtaaaacggttaacggtacaccaaacatcatccagcgagcaaatgaaatttcaatgccataaagttcgttcacaactgctgcaaaaatggtattaggtggcgttccaattaatgtcgcaagaccaccaatcgaagcgctataagcaataccaagcataatcgcttttccgaaattaaatctcggagctccctcttccgtatccagatcaagctgttctgacacctgataaatcaccgcaagtccaattggtaccatcatcatagcggttgcggtatttgaaatccacatcgataaaaaacctgtcgccgccataaaaccaagtacaattttctccgtactcgttccgattgctgatataataaaaagagcaatgcgtttatgtaaattccatttctgcattgaaagcgcaatcaaaaatccacccataaaaagaaagatcgtattgtcgccataggcagatgctgttaaatcaccttcaagtgcacccgttaggggaaataagatgagcggcaagagagatgttgcagggatagggatagcttctgtgatccaccacgttgcaatccatgcggtacttgctaatacggccaaaccagcttccgaaagaccgttcggatgaaaaaagagcataagacaaagaaataaagtcggccctaaaactaacccagtgatctttctcttgtcgtaggctggccctggccctgatgtaagcgtaggatttttttgtgaactttgggaagggatttcaggcgtgtgtgaagaagcgaatgttaagagattctttgcacgatgatgttctttccaaaaataactccaaaatagacgggcttgttccatagtgatacctcctatcgttcatttcactctagtgtaggattcgccaggtacacctgtcaatattttcacaattttgggtatatattactctttttaaaaaaggacttttgctcgattattggtttatcaatcacattaacgctttcaaacccccttatatttccaataagggcgaacattataagttgatggtgtgatttttaataattcaaacaatatattacaggaattagcgtatcaattcgattgacaacaagttgctcaaaatcgatccagggggtatatgatgagaaagatacagcagacgaccattaattcggttgtaaaatatggacaaacgaagcttccaaaatcagcgaatacagaatgtcctgaatgtggaaatgatgccgcatttcaattgaaatttgattatcaaattaaccaggccgtgttctcaacgctttctcgctgttccatttgtaaagaagcggttctcttcattctaattaaaacttctcacggtgatcgaggtgaggaagtcgaactttttgttcatcaaacgtcctttacacgtgaaccactcggtagactaacgagttctgctcgactgcctgatgaccttgaacgtgtttaccgctctgccgtaaatgtacataatatgaaagactggacggcaacagctgtaatggctaatcgcgtcctcgaaagcattaccggcagttttctagccgagaatgaattaggacagccgctatccaaacagctcgaaacgcttgcaaaacaaattgatttagaagaaccgattgtgaagttaggtcagctccttggaaaaggaagtaatctgaacgatctcctttgccttgaaaaagcaacaagcgaagaaaccgcaaatcttattattgatctacttgattcattaattgaatacttatatattcttcctcagcgaattattcatcttcaaaaacaaattgaaggataataaaaaaacaggtagctcatcgtgagctacctgtttttcttcatctcgtttattctcatttaaaagttacttctaaccgtttgcttcctctttctcttgaagagagggatagttaatgaaaatcgcaatcactccagcaaccgcaataagaataggatatatcgaatatggtaagagggtgagcggcgaaatcgatgcaagtcctgcaaccgctagaacctgagcaccatatgggagcatcccttgaatactgcctgaaaaaatgtctagaatactagctgatttccgcggatccacgccatacttttcagaaatattcttcgccagcggtccacccatgatgattgaaatcgtattattcgctgtcgataaatcaagcacactagctagaccagctataccaaattcggctcctcgacgtgagtttactctacttaaaatcttatctagcacgtattgaataccgccattatgcttgatcacttcgatcataccaccgattacgagggcaatcatcgcaaggtcttccattcctttaatcccttctgtaacggtggaaataagtccactcattccaaatgaaccgttaaatagacccactattccagcaaatagcgttccgctcacaaggacaacaagaacgttaacaccagcgattgctgcgattagaacgcctaaatatggaagaatcgtgataaaatcaaaagcacgttctccaccaactgttgcctgctctcccatcgttaacacgccatatataacagcagtgataatagcggcaggcaatacaataaagaagtttactttaaacttgtctttcatttgcgtattttgtgttcgaacagccgcaatggttgtatctgaaatcatagaaagattatcaccgaacatcgctccaccaataactgcagacaaggcaagtgctggcgcaactcccgtttgttctgcgatcccaatcccaatcggcgcaagggctacgatggttcccattgacgttcccattgaaatggaaataaaacatccaatcaaaaataagccaacgattaacaaattcgctggaagaatggatattcccagattcacaattgaatcaaccgcgccaattttttcagcggttccagcaaaagctcctgccaataagaagacaagaatcattaatataatattggtgtttcctgctcctcggcaaaacacttccactttcttcataaagttttcttttcgattcatcgaaagggctacacccgctgcaattaatgaagcaagaataaccggcatgctataaaaatcctttgtcacaatcgctgtgccaataaagagcacaataaaaatgccaaggggaagtaacgccaggccatttcctttaatttctttttccattctctctatctccttctacttttctactgcataaaaaaacccacttcaagagaagagggcttttgctcttatctctcaagatttctcttgctggaagcagcacctttctgaatgtcagaggttgctgaagcttcttcgggccagatccctccacttctcttaataagaaatatgcaattattaatgagcataaagctcagattttatttgatttcacaatcgaacgagctttactttatcatgcatgattctgctgagtcaactctttctacctgcatgaaaataaactccttgcttataggagtttattcagagagttctcatatatttttgacactaactttcaccgtttaacgatttaaaaactgttctatgtctttcataatcgatgctggtcgctcctcaggaagaagatgaccggttttcttatagacaatcagctcagcatttggtaagtcgctgcttaaacgtttcccaattttcaatggcacaaccctgtcattttctccccatattaagaggctcggtgtatgaatttgttttagctctgcttccgacaggtcaccttctcgatcacggatcatacgaaccaacgatctaaaaatcccttcgttaaagaagggttgaatataaccatccatcatctcttcatcgataagcgctgggtcataaacacaattgagcaaattccccctaactccttttcgataaagccagcgttttaagtagacagaaaagaaaggtaagtaggacgtatagacgagactctgtttggctttctcaagatatcctgagctacatagcaaaatatttttactcacaaaattttcttttaacgctgatgctctcatagctacctgtccgcccatggaatgcccgatcatgaccgtattttcaatcgaaagtctttccaatagctcaacaactacttccgcataattttggtaagagtgaacaaagtggtgagacttctcgcttttcccaaacggcgggagatcaattgcaacaaccgtgtaggcctttgttaataatggaattagtcttctaaagctgaagcttgacgacaaaaagccgtgaatcagggttataaccgggcgatcaacagcttcttcatttctgtaatactcatagtgaatgtcaatccctttaattttctccgtattttcttttaaattttgagctaataacatctgtcatctcactccgaattttgattttgctttttctggtaatagtagttctttccagtcgaaaatggcttagcagttcacgtttgtgttatacgtattttaccccaatcaagaaatgaaaaacttttttaccacctagagtgtacatccatttttttcattctaactcaacatggataaggtctagcaatttaatgtttcttttttgctccttatggtcaatgacgcgtagctctttcgtcaatggctcgatataatgaacgtagccagagaggacgttcgtttcaccgtttttaaaatagtgaaagcgcaggggccaatggaattccatagcctggcatatcacttcattcatttcctctattttttgctcatcaagtacaggcttttgatttcttttctcttcttttttccaatcacgtagctctttcacatgctcaggtaacatcattgatgtccactttatatttccacgatcacgaatcacgtatcatcccccctttatgctttatgcccacctacaagcttacttctgtgtagtgctgtaccagctttcgtatatgaaacagcgcgtagcagagcatccgatccgtatttctctctaattgaatccatcacatagccaaggtctcgctgtttcggtcgctcagtattaaataaatccagctgtacttcctcgtcattactaatattcgaaagagtgatcgaaattttccgaactgtttttctttcataaaactccttaaatagctgtagacaaacgcgatatacttcaagcgtaatcgccgttggactagtgatactccttgagcggtgaaaaccaccaccaccttcttctttgctatagctgatgccaagactgatcgtacgacctgctttaccggcccttctagcgcgtcttgccacttcttcactcatctcaagaataacgtgttgaatttccttctgatcatggtaatcccttaacaggatctggcttttcccaaaactaatctgtccctgcataatgggagcccccatttcagaaagatcgactccccacgcatgatgatagagctgattacccataacaccgaatttctcttctaataagtgaagcggataatgggcaagttgctctacattccgtatacccattcggtttagcgtgcgttcaacgcggactccaattccccacatttgactgatcggagaaaggggccaaagctttttaggaatatcttcatatgtccactcagccacccctttttctttcgcttcaagatcaaggcaaagctttgccattaaaagattcggtccaattccaatcgcacatggtaatccgaatgtttcgcttatttcattttttatcttataagccacttcaaatttatctccccatagtcgttctgttccatcaacctgcaaaaacgattcgtcaacactgtacgtatggatacattctgatggcacataacgatgaaaaagcctcgttatttccattgactgtctcaaataagaggacatttttgcgttaacaatatgaattcttttgtcatttgggatttcaaacaacctgctccctgtacgaatgccaaattctttttttagtgctggagatgccgcaagcacaacactaccctgtcgttctacatcaccgacaacagcaagataacacgtaagcggatcaagccccatctctactgctgagcagctggcataaaagcttttcatatcaatacataggatcgttttctttggaaattgtgaataatccattcgtatccccctttcttccgtcaaaacagaacgtttgttccatttatctataccccgtattttacccgaatatacgttctctttacaataagtactttcttccaatgagaaaacgtcttgactgaccaatgttcactaaagtaggggaagatcggaaggtgaacagatagagacgtctttttcatatggttcggttatttattgcctattgagtgtgtgaatacctaagcctattgaaccatgcagtattttaattacaggagaatcgtcctattactacacacaaaaggataggacgtaactatcaaaatcgtttaaatagtttgaatacttaacctcttgtgataaagttagctcatcttaatcacgagggggaaattggaatgggaaagaaaaagaatttgctttcaattggtttatcagtagggctcgtaagtaccatgttcgctccatcctcaacattcgcggcagctgatacgaatatgaataaagaaactgggacgccttcttttgtttctgggaaattaacaaaagcaagctctcaaaatcccaatgaagtgttattcgattacttaaatgaccagaaaagcatgtacaaatttagtggatcatcggcacaggacgcttttcaaataatttctaaagaaaaagacgaccttggcttcacggtctttcgtttacagcagtttcatgaaggaacaccggtttacggctccactcaaaccgcacacattgatgaaagcggcgtcttaactgctgtatccggtacagttattccggaccttggatcaaagaaagagcttaaaaaaacaacaaaattcaagaaacaggatgctattaaaaaagcagaagaagatctaggcttctctccaacttatgaacagaaacccgaatcaaaccttgtcgtttatgcagagggagaatctccgacatacgcatatcacgtcacattaaacttcctttcacctgaaccagggaactggcagtacataattgacgcaacaagtggtgaagtactaacaagttttaacgcgcttcacgaagctaaaaaagaaggcgttggtaagccgggcggcggtggcgcgatcaccggaacaattcaaacagccagtggaactggtgtccttggtgaccaaaaaacgttcaacacgcttctttcttcctcaacttattatttgaaagatacaacgagaggcggcggtattttcacgtatgacgcagctaatcggactaagctaccgggttcgttatgggctgatgcggataacgccttcaacgcaaactatgacgcggcagctgtcgacgcacactactatgcaggcgcaacgtatgattattataaagatgttttcaaccgagatagttatgacggaaatggggcaccactagaatctaccgtacattatggtcgtaactacaataatgcgttctggaacggcagccaaatggtctatggtgatggagacggctccacattcgtatctctttctggcggtgaagatgttgtagcacatgaattaacacacgctgttacagatacgacagcggatcttatttatcaaaatgaatcaggagcgctgaacgaatcaatgtccgacgtgttcggaacacttgtggaatatcatgataataataatcctgactggttaattggcgaagacatttatacaccaggaacttctggggacgctcttcgttcgatgtctgacccttcgcagtttggcgaccctgatcattactctgtacgctatacaggtacacaggataacggcggagttcatattaatagcgggattatgaataaagcagcttatcttttaagtgaaggtggtacattctacggcgtaagcgtatctggaattgggaaagacaagcttggcgccatttactatcgtacgctaacgcaatatctaaccgcgtcttcgaactttagtcaaatgagagcagcagccgttcaagctgcaactgatctttatggaagcagcagctcggaagtacagtctgtaaaacaagcatttaatgccgttggcgttcaataagaagttagttaagacaggtagccagcggctacctgtcttttcgtttgttgaaggttttataagtcttcaaacgggaaagaaatggctagaactaaaaaggaggaagaaatcatggcgatttttaaagaagacgcactaaagcaagagcacgtgatgatcactggagcgactggtggtattggatttgaaacggcaaaagccgctgttcaagctggggctaccattacgattacaggaagaaataaagagaaattagagacgttaaagaacgagtgcgaaaaactagttgcggatgctaaagttaccgtacttccagccgacttaaacaatgagcaagatcgtgctaccttgatcgaaaatgcgataaaagaaagaggaacgattacaggtttagttaattcagcgggaattggcggcggcgatacgctcgatcagttacaagaagaagaccttcgtaaggtgatggaactaaactatttctcaacagttttactaacacagctcgtttacagtaaaatgcgtgaagataagaaaaaaggttccattgttaacctctcttctctgtccgggcttcgaggaacttttggaaacaccgcctatagtgcttcaaagtttgccattaccggatttacacagtcatttgcacatgaagcgattcgtgatggaattagagttaacgccgtctgtcctggcttcgttgacacagaaatgggaagaaatagcattgagtcaaaaggaaaaagagaaaacaaaagctttgaagaagaattaaaagcagtagaagaagcgatgccttcaggtagaattacacaacccgaagaagtagcgaacagtatcatttacctcctatcaaacgcctctgagaacattattggagaatctttaaagatttcaggcggaagtgtgatgcgttaagctgccttcattgcaaaaaactcatggccattcgatcccttaagatcgaacagccatgagtttttatattagcgataagttcaaatggtactagcgtagatacatgtatccgttattttcttcccatcaatggacaagtcgtcatttttaagcgttccctcaagaagataacccaatcgttcgggtatcgctcgactccgcgcgttctcacgatcacactgaatttcaactcttctacaacccaagctttgatgagcatattgagtcagcttttgaacagcctctgtcatatacccatgtccactatgccctgtcgccatccaatacccaatttcaagcttaggaacatcccaatgaatgttatgaaaacctgttgatcccacaaactcatttgtttctttcaaaaaaacaagaaagcgcaaactttcacgctttaggaacttgatgtgcgcttctcttgtattaatttccgtttcctcaggagtaggtgttacccgcgcaaagcctagccacggtcttagttcgtcaatagatgtttgaatcgcttcatttaccacttttccatcacctgactggggcattcttaacatcaatcgttctgtttcaagggaagtttcaatttccattaatatcgggttcacaatcatctctccaatgtgtcgaataattaaaggaccaattctaactagaagataaaccgctatccagatggattagcggtttaaatgaaaacgtctcccaatcccgacaacctaagcggctttaggattaggaccgaagcgattttcttctcgctcactctcaagacaagtgaaaacaagaataacaacactaccaataaaaggaatgagtccaatcaatacccaccagccgcttcgacctgtatcatgcaatctccgaactgttacagcaagccctggtaaaaggatgaataaagaataaatccctgttagaaatggagaaatatcagctagcgtttctattagggttaggacaactgagaaaatgatgttaaaaagagtaaacatccaatattcttttcgcctggctcttccctgaaagttcacataattctttaacactttcaaataccaattcatacaacttctcctttagcgactagattaagtttagtagaataatatcgtgatacacatgatagtatagcacaaaacatgacaatattaggaaaaaatcagtaattggttaaatatgagcgtttagataaaccgctttacgattgattactattttgatactctctccttaagagactcattctaagtcgatcgacgtaacgtccttctcggtagcgatcttctcgcaatatgccttcttccacaaattcactctgcttgtatgacttaatcgctttatctctacttccactctgagccaaatcttatttaatttcaattcagtaaagccccatccaagcatcgctttcatagcacttaagccatatccttgtccccaatagcgtttatctccaatcgcaatccctagctcggcatggccatttagttgatcaatatttttcagatcaacccaccctatgtgtttcccttcctcagttacaatcgctcgctgctcatacccgttttttcgactgatgcataattgaatccagctactcgtttcatctcgggtaaacggtggatatttttctggtatgttcagatgctttgtcacttcagtatctagacaccactgatagcggtcttctgtatccgaaagagaaagttctctaattatcacaactggtaatggctttcctttcattttagctctcctactttccatcattttctttcctacttaaatctgatccctattaacgatcctctattgattgaagtatttcatcatttctttgacaatcgtttcataataagacgattcatgtggaacaaaatgacgtttacttattttttgattcaagttctttcgttctccatcatgattaaaccaaaacccttccacacaaaggtcgttttgttttcccatccagaaatcatagaatgcttcaaaatcagcctgaacaattcctgcgacctcttctttttgaagatcaaatgtatcaaacgattgattgtattcaaaaagaaagatatttgcgatttcattatcaaggaaattaccttgcttgatcgatgcattcattacaagcaaggggtgcaattcctcataagaaacagggaccccaagttcttcctctatttctcgcactccatccttcactgattcatctgccattaagtgaccagctgcagtaatgtcataaagacccgcaaaatcttttttcaaagaacttcgaagctgcaaatacacttgtttaaccccttcttctctccgaacgaaccagcattgaaaaacctcatgccagtgccctactcgatgtgcctcatctcgtgaaaccactccaatcgggtttctattttcatcaaatattcttactctttcatctatcatcttgtaacctcactttttctctcaactcatccatattgatccgaaagaactgccgctctcatgacggtatctactcatttagggctttatgacgaataacataatcaatcgttaaaaaaggaatggaaaaaatcctcatatcgtgctgagcttttagagatcccgctccaacctgctcaacaaaaaactcttcatcaattggtaatggaaattgtttatttttcgttgataaatacgttcctgtatcggcttttgaagtgcgtttctttctactagacagcttcaaacttctaccatattggtttaattcaaggatacccgtcattgtggaaaatgggagcggtaatccgatgttcatatacgttctttctccctttttgtgccacgaataaagcgcaacaaagcacacttcttcattcacttttcttacccaggctcttggctgccgtcttccatccatatgctctttaaccgaaaagatatctcctctcatttcgacccacttcctggataacggaagatttatttgaaggattcttcgactaaaaaagcgataaatcatagccagaggtttaaaccacctatgccatttcacactagcaaacaatctgtattcggttgtattttcataaaaatgtttaattgttggagagagacaatggaattcaagatgaggttcatagatgctcatgtcgctcactaatccactgtaataaaaagtacgatccgcaatttccttcagaatttcttccccaatcactttccttcctcttatttggctaaccggaaaagaacggttattcattatcacttgtaaactctccctcatacgaaaaaacagttccgatgattggatttttcaccgtcacatgaatgtgaaagctttctcgatcttctaagtaccgttcggttactgtcgctaaaccttgaaaaaattgtggcaaaggaatttcttttcgtccaagcaccattctctgatttagtgattgaatcgtcatactcccatcatcaccatttactttaaaagaaaggtctgaatacattaacgcaggttctcctaaatagtcttcgatcatcagtctttcctcatcaagtgtcattagagcattaaagtgacgcttcttctgcccaaaagaaaacgtacgttgccaatgaacctcttcttttccactcgccccaattcgagacgtatttttgatttgaaaggggatatttgttcctctctcaggaaaaagaagcttcgtctttgtaccaagataaaatatgggatataaccaacgaggacctccggagatctttttcattactcccgacccacgaaaagcatgttgtttcgaaattgcataccttttctgtaacatcggatgaagctgatgaaattgatcacccagcgcttttagataaattgacatgacgatgctccttatctctttctcttgcatttttttgccgttggaatgtcacgactaattttcatcccaataaaggataaaatgaacaaactaacgttaaaggttaaaggattaaatggatgtgtcagtgcacgtggcgcagctaaaatagcagatactgttaataaaggaaaagcaaccatttgcattttaaataacaaatgtttttttcgagtaaataaccaaattaaaccgaacaacatttcactcaaccccattgtaaaaaccacttttgaagcatcgatcgcttctggtaatatactcgctgccatcgatacctcttcaggatgcttcatccatacttttggaactagcccctggtacatccaaatgaaactgaacataagggctatcatccaatagctaataaatcgggtatattgggaagctggtgattcccccttctcaagccatcgcttcaacacatcaaaacttaatgctgttccccaaccaatcattggacgaaaaataatagaatctatgaaagcacctacttttccaaaacgcgtcttgtaatcatattgcgttaaaaatgtaactttcttttgctcaaccggtatatacttccaataacctttcccctccgagataatcgaaatacgctgatccgtaccgaaatgtaacgaagatgtcctcgatccgtcattaccattaaactctccaacactttttccccatccttcgatcgcgattccaaatcctacattcgttttgtaagaaaagtgttgaggggaactttcattttctttcggtaagtaggtaatggaagtaaatcggatatcccactgttcatgaagatgcggtcgttgagaagcgctccaaagattttcgatttctgtttcaattggaacttcaacatagattggttttcttttcattttctcaccctgtcagctagtctctttgattcacaaagcgtatcttaatttagtgtaaacctctctagtcttccaaaacaactccattctcctaaataaagagaatgatagtaaaatttcctacaaagaacctaaaaaagagcaccgaagtgatgctcttaagacaattttatttttggtcaaaaaattttccagccactttttccacgaggcctggagctgcgtgataaagtttggctccagcgttcatccatcccggaaggttcacttcgcgcgcgcccttttcaatagcagaaataatttcctgcgataccttttctgctgagagcatcatcttttctacgtttttcgtataagttccgctactatctgccgtttcaaaaaagttcgttttgattggacctggattcactgtggttacttgaatgttgtgttctttcatctccatacgcaaactgtttgaaaatccaagaaccgcatgttttgaagccgaatatccggaagattttggcgtagcgagctttcctgcctgagaagcaatattgatcacgtgacccgatcccgcatccatcatcccaggtagcacatgtgaagtaaatcgcattagtccaatgacgttcacatcgaacatggcttcaatgtctttcatatcggcgtccacaaacgcgtcaaatttcccaaatccagcattattaatcaaaacatcgatcgggggcatttcctccaaaagcatcggcagaacatgctcaacgcgctccccatccccgacatcaatcgtccatacggctggcgcataacctctgcttcgttcgattacgcccttcacttccattaacttttcttctgaacgtgctacaaggattagtttagccccttttttagctaaatcaattgctaactgtcgtccaattccgcttgatgcccccgtaataagaacaactttattctttaaatttttcatgtacttcacctcttacgatctagatcgataaaccgttttttccttttcttttattttaactatcacattctccgactcaagataatcgagatgcccgattgtttcggagagagtaagacctgtttgctttttataaactcctggaaataatttctgacaaacttcaaaggcggtcattggagtattcaaaaaggatgccaccttctctgaacgctcctcttgtttttgtaatcgttccttgattaactcgtccggatttaagattggctccccatgaccggtatagacatactgaagatgtgcatctaacgttttacgataagaattccgctgctgaagaagcggtttaggtctctccgtccctttcacatatggcggttcaagtaaggggtttgaagatatcttcttaataagatgatcgcctgcaatcattattccagtctccttatgccataaggagatatgactttgggcgtgaccaggtgtttccatcacagtccaccctgcacagccaggtaagtcatctccatctgaaagatgcacatcacatttcgctcgatcggtatacgcaagatagccacgcgtatcacttacatgatcgaaatattgttctggaaccccagcttcacggtaaatccctgtcataaacgcttcattttccttcaaaaaagaatcgctcatctgtagccaccggtcgttcttccaatgcccaagaacgttaacgccatttttcatcatttttccgacaaggccaatatgatcagggtgatgatgcgtgagtactacctgatcaatatcttcaaaagcgacaccataactttgcagttgcttctcaagttcttgttgcgcttcgggtgtacgcgggcccgtatcaactaatgtcagcgtatccccttttaataaaaaacaatttaccggaccaacagcaaacggagttggaactgtcatcgacagtaccttttctttcgttagattcaaatttaccgccacctctacttttcgttacattaactacctctattctatcgctgttcgttctttttgtcattatatcgagatagtttattttgaattttccaacatttaaggttgacatttttttattttcatagcatactatgtaaaattagaatgatcgtattggctttgaaagggattagtagaagttctagtatgtgccagagagagggattcatcggctgaaaagtcccttcaccttacttatttcgaacctaccctcgagccagctgtagaaatacagccgcttcctacgttataaggaactagaggatatcatatgttgatatcaaaaataaggtggtacaacggataacgcccattcgtcctttcataaggatgagtgggcgttttatttggaaaggatgaggatgatgacaagaacgaacatcggcttcattggtgccggatcaatcacagaagcaattgtcgaaggaatgatttctgaaaagtttgttgactctaaccaaattatgttattgaatcgctccaattcacagcgacttgaggaattaaaaacaacatacagcgttcacgttactcaagatattcagaaactgttgcaacaaaacagagtgatcatactagctatgaagccaatagacgcgcccgatgctttaagcaagattcagccatatattcataaaaaccatctgatcatttctgttttagcaggcattacaactgcttatatcgaagaaaagatccacacacgtacccctattgttcgtgcgatgccaaatacatcagcaacaatagggttatctgcaacagctatttcaggtggagcgttcgcgaatgaaaatgacttattgtttacaaagcgtctgtttcaaacgattggtagcgtcgtgcccgttccggaagataaaatgaatgccgtaacagggttatctggtagcggtccagcttatttctattatatggtagaatgtatggaaaaagccgctatacagaatggacttgacgaggaaacagcacgtgaactcatcttgcaaaccatttatggagctgccatgatgcttcgtcaaacgaaacaaccagcagaacttttaagaaaaaagattacgagtccaggaggaacgacacaagccggaattgctactcttaaagagtatgattatgaagaagctcttttagcatgtattacagatgcaacgaatcgatctcaacagctaggtgagcttttccaaaaacaaaactaatgtttttgcccggtcattttctacaatgtccgggcaaaaaaataccaatatattttacacactcttcttctggacaacgctacacattttttttaagtggtctaaagcttcttcactatctaatccatttgcaacaatggtcatcggtccaaagtgagttgtcagtctccccatacttaaaatgctcttagcatttaatcgtttcccttcaacttctacaataatgtaactactaaagagatttgcactctttacaaagtccatcaagaaggccattgtaattttactcgtgatcaaaacggtttctttatataccatccttgcatcctcctcagtatctaatacaaccgtttgcacatttctattttgacaccctacctccctaaccgcaaggactatggcacctttcctgacacaaactttacaactgattcatatgttatgtcagatattctaacaatccacccgtgattaatgaatagctatgatataatgatagcagattgccagtttagaagacttcaatagtatatgtagctatagctacattatgaatatgagcatagggagtgactggagatgtcatataaagataaaaaagttctgcccatcggatcagtcagtgaattaactggactatctctcagaaagatccgctactacgaggaaagaggccttattctacctgaccgatctggtggtggtacaagaaaattctcgtttacagatgtagaaaaactaatggacattgcaaatcaaattgaagatggcatgcaaacatttgaaattaaaaagctttataaaaaagaaaagcaaaaagataaagacaaaattagagatgaaatgattcgcgggcagttaaatgcagcatttaaaatgacaaaatagagaaagaagcaagcgatattcgcttgcttcttttagagtttcttcgtttagaatatacgatgcagggtataaataaaaacagaatggtaatgaaaggagttttgctctatgagttttcattatacagtggaaacctctaaaacagttgaccaggcaatttctgacttaactgatgaactgcaaacagaaaaattcggcgtattatgggattttgacctgtcagctaagttacaagaaaaaggaatggacttccaaacaccttatcgcgttctcgaagtttgcaaccctaaagaggcagagcgagttctacatgaagataagttagttggttattttctcccttgtaaaatcgttgtttttgatgatgacgggcaaacaaatattggaatgccaaagccaaccacattgttaaacttaacaggcaaagacaaattaaacgaaattggatatgatatcgagaaacgcctgatttcctgcattgagaaaagcaagtaacattagccctcctctctttcattagagaagagggtttttttctagtttttctccctttttatagggcggcaatcttttcatctattcttttagtcgtggatcatgacgatatacagtcaaatcgatttttgaattaggaagaaaaatgatcccttccccttctaacatcatcttttgattgatgtagccttcctctgttgttatgccaatttcacctttcgagttaatcacacgatgccacggcagattatgcccttgactcatagtgtgtagaatccgcacaacttgccttgctccacgtggacttcctgcacactttgcaatttgcccataagtcatcactttccctggtggaatttttttaataatcgaaacaacattttcagtaaattcttccacattcctcaccctctaaagcagtagtttattcagttattatatcagttcctgcaagttctcaaataataaaaactttgtataaaaatagagacatgctagaaactatgcttagttagctattgcaaaggagcttaaaaggtcatggataagcgtttaattgattggcctacatttttaggtgctttgagtttattactgcttgtaactgtcccgcttgtcctttttcctgaaaagggaaaggaaattgtcaacaaagcgaatgagttcgtcaccacccaatttggcgttctttatttacttgtaggtctcgggatttttttctttttgatttatgtcgcctttagtgataatggtagagtgcgcttaggggaagaggacgagcgtcctgaatttaacaatttctcatgggcaggaatgcttttctgcgctggaattggatcaagtattttatactggggcaccattgaatgggcgtattactatcaaggtccaccatttggcctagaacccggcacggaagaagcaatcctatgggcaagtacatatggcatcttccactggggcccgatcgcatgggccatctatacgctacccgctttaccgatggcctatttctattatgtccgtaaaaaacccgtactaaaaataagtgaagcaacaagaccattaattggaaaacttgtagatggcccaattggaacgattatcgatgtgctttttatgtttgggcttcttggcggggcaggaacaacgctagcacttggtactccaatgatcgcagaaggaattgatgctctcacaggtattggcgtaacaatggtactaaaaacgttgattctcgttcttgtaacagccattttcgccatcagtgcttattcaggattaaaaaaaggaattaaaattttatctgatattaacttagttctctcaatttttctgcttctatttgtattaatctttggcccaacccgttttctcgttgaaacagccacaaacagcgtcggtttgttgttggataacttctttcatatgagtacttggacagagccatttaatgctcttggtccatatgataaaacgggctttccggaaagttggaccgtgttttactgggcctggtggatcgtatacgccccttttgttgggttgttcgttgccaaaatttcaaggggacgatccataaagcaaatgattcttggaaccattagttatggaacttttggaagtttattgttctttggtattctcggaaattatggacttcatatgcaattaacaggtgagtttgatgtgattggggtacttaatgatgagggagcacccagagccatcatagaaaccattggtcaacttccattttcatggtttatgatcttcatttttgtcgtgttagcgatcatttttcttgcgacgacgtttgactcgagctcttatattttagcctccgttgttcaaaaagaggtcaaagatgaaccgctacgctggaacagactgttttgggcattcgcgctctgccttatgccgttagttctcatgtttgtcgggggacttgggacacttcaaacagcgagtatcgtaggtggatttccccttctctttattatgattatgcttggttggtcatttatgcgagcttctacagctgatatcaaagcttctgaacattatgaccctaaaaccttttcattaaattacaaaaagattttacaatcaatcaagcgcaagaaaacgaagaaacaaaaaggacctatcgatgctcattttgaagaggataagaaagataaatagcatagcagataatttttccatatcgaaaattatattgacactttcagttggtcatgataaaaattgaataactctataaatattgaactgctttgaaggaaaactagtagccaccttttccctattgaagagagccgatggttggtgagaatcggtatataaaaggacgtgaatttcatttctggagcttcttttgtactcgcaaaagacggtgaagatcgttacacaatgaagaggtgagttttctcacaaccagggtggtaccgcgataacaatcgtccctacggataacgtaggggcgatttttttgtggaataacggaatcagcattcaataataaacgaaaggagcaacagtatgagtcaaaatgaacaatggtcttcaagacttggttttatcctagctgcagcaggttcagcgattggtctaggggccatatggaaattcccgtacacagcaggtcaaaatggaggtggcgctttctttctgatttttattctatttacattaatacttggtcttccacttctactagcagaattttcaattggacgaaccgctcaaagcaacgcggtagattcttataaaacaatatctccagaatcaaagtggtatcgggttggtattatggggatgattacttctttcatcttgttatccttttatagtgtcattggaggatggattatcgcctacctatataaagctgttacaggagagttaacaggactctcctccgatgagtacgcacaagtattcggtacgacaatatcaaattcgtttgttagtattttcgcgcaatttattttcattattctaaccattctcgttgtcgctcgaggtgtagagaaagggattgaacaggcaagtaaagtgatgatgccggctttatttcttctcttcattattctagtcattcgagccgttacgctagaaggttcaatggaaggcattttgttcttgcttcagcctgacttcacaaaagtaacctctcaaacaatcttagaagcaatgggacaatcattcttcacattgagtgtcggagtatcggttatggtcacgtatagttcatacttaccaaaaacgcaaagtttaccacgctccgctctgtcgattgtggtaatgaacatttttatcgttcttcttgctggtctagcgattttccctgccgtttttgcttttgatcttgaagctggagctggtccagttctcttatttaatgtgcttccgacagtatttggtcagctgccattcggaatgctctttttcattgcctttttggttctgtttttgtttgcagcattaacttctgctttttcaatgcttgagatcattgtatcggttatttcgaaaggtgaccttaagaaacgaaaaaaatgggcatggatcattgggcttgccatttttgctgttggtattccatcagctctctcatacggtgttttgagcgatgtcaccttattcaataaaacgatatttgatttagccgattacgcggtaagtaatgtgcttctaccgatcggagctttattaatttcaattttcgttcccttaaaaatgaaaaaatctgcgctctatgaagaattaaagcgtggtagcggattaaagaaaggtttgttcgaaacgtggtatttcctaattcgctttgttgcaccgcttcttattcttttcgttatgttagatgttcttggaatttggtaaacaggaaaagcctcaccttatggcggtgaggctttttactttgttattcttcttcttcaataggtgcagcaggtttcggttcatctttaaggtcaaaataagcttcaaataatcgtctcgcaatatctttgtttacagattcatttctgtcactacttaaactaggaaccacaaccgctaacgcaatttctggatcttcataaggagcataacctacaaaggttaaattaaatccatcaatattattatcacgaccaaatttcacttcagccgtacccgttttaccagcatgagtgaaatctgttcctttgaaatatttcgttgctgttccgttactagcattcgtaactctccataaaccattttgtactctgttaatatcgctttgactcatttgaatacgattcataacgtttgtatcaaactgatcaacaatgatattcgataacccatcgacatttgatgcctcatgaacttcttttaagaaatgaggctgaattctttttccgtcgtttgcaatcgttgaaatatactgagccatctgaagaggtgtgtacgtatcaaattggccaatcattaagtccattaagttacctatttgttggattccaccattgattccagtcgtttcaattggcatatcaattcctgtcttgtttccaagaccaaattgattaaaatgatagcgaacctcattatatgcatttggatcccacggtatcccacttgtgtttggaacataatcataccctgccatcatcatggcgatcctgaacatgtagacgttggatgatctttctaacgcttcaacatcattcacccaaccgaggtttgcatatgacgccttatcattggtagcaggtatagaaattggggtatcatataaggttgtgccgtgactaatcactcctgtttcatagcccgttagcacagatgctccttttactgctgaacccatttcgtatgcttccgacaaggttccataagaatattcaatatactcattgtctttagagctgtattttgtcccaccaaatgctaatatctcaccagtgtcaggatccattccaatcgcataagcacgatccgcatatgggtttccccgtgctcttgcttttcttagttcttcttcaagaattgtttctaacttctgttgcagatcaatatccacagttaatacgagatcattccctctttttcctggaatcacttcaggctcccctattggctttcctgatttgtcagttacatattttttcattgacttctgccctcttaataaatcctcatactgcttctcaagatagctgatgccaacaagatcgttattatcgtagcctttcattgtataagcatccaacgattcttttggaatttgacctaagttcccaaacattgtttccatcgtttcattataaggataaatccgttccgcatctggcgatatgtcgactcctggtaaatctttaaggttttcactaacttgcgcaatctcttcacgtgttaatcccttcttaattgattgagaagagagtgcatatcccgaatccatctgtcgtttgattgccgcaattttcaattcatccttatcacttgtaatttccttaagatcttcttcattgatgcgatcaatttgtaggctataagcctttttagactcaagttcttcccactcttcttctgataatttggctttggctttttcaggtctagtaataatccagaaatctttcaaatcgcgctctgtcaccttatccgtatccatctcaataaatgaagctaatttacgagcaacctcaagtctttcctcttgtttcgtattttgatttcgaatataggttaatgtaaacgttggctcgttatcgacaataactcgtccgtaccgatcgtacatctttcctctaggggccgatgatttcgctgttacattctcggtttgttctgatattcgttcgaaatcttccccttgcacaatttgaatcatcccaagtctaaggataagaatagaaaacaatagaaaaacaaagagaaacaaaatatttagccgaaacggcacatgtgttttcttcattttttccttaatcatcgacatccccccgcgcatttccttatcttcccaactatcataacataggaatattaggacttttttccttattagaaaataaattcaaaacattttctactaatagaacgcttttatcccgttagtattacaaaatagggttaaacaaggttccataaacacataacctagctcacatgaaaaagaagcgtgcttttatagcacgcttcaaggatttgaaccatttataaaataggagacaatagccttgaaatcgactctttaaatcgaatccagagagacctttccaagtaggaccctcccgttaattccacacttttttccatatccttaataaaaatgttcgttaactctgttgatatttcttcgtcataaataaatgcgtttacttcaaagtttagtcggaaactccgtacatcaatgttagcggtgccgactgaagaaatttcacgatcgactgtgatggtttttgcatgaataaaaccattttgataaatgtagattctcgcccccgcttttagtaattcgccaacgtaggaataggtcgcccaataaacaaatggatgatctggcttattgggaatcattaatctaacatctacaccactaagtgccgcgatacgcagggcatctaacagacttgcatcgggtataaagtaaggggtttggataaagattgttcgatttgctgaggtgattagctttatgtaaccatttttaatttgttcccattcagaatcaggtccactgctcacaatttgcacaccggcttttccaatcggctcaatgatagggaaatagcacgcttcataacctaccttgttccgtgcagcgtgattccaatctaacaagaatctcgtctgcatagcgagagttgcactaccttcaattcgaaggtgtgtatcgcgccaataaccaaacttcggatttaacccaagatactcatcaccaacattgaatcccccaacatagccaagtacgccgtcaataatcacaagttttcggtgatttcggtaattcagccgtgtattcacataagggatgcgtgaagggaaaaagacttctacttctccaccagcttctatcagctctctgaaaaaacgcttccttgtttttcttgatcccatctcatcataaagaacacgaacctttaccccttcacgtgccttttgagcgagcttttctacaattcttctacctagctcatctttttggaaaatgtaatattggaagtgaatatgatccctcgcttgaccaatatcctcaatgagggcattgaacttttcctcaccgtctgaaaaaatgcggatgctattgtcctgtgttagtactgcatcatcattcacaagatgcatataaatcaggtccttatgtcgcgcaatttcttcatgcctaaaaggataaacgccgcttttaatttcactaacctgctcctcaattaaatcctcaattcctacttttttaatattatcccagtcaaacaaccgccttctgcttaagttttgcccaaacactaaatacatcacaaaaccaagaaaagggataaaaagcaataccataagccaggcccatgttgcacctgcatccttgcgttcgaggaaaataacaagagctgcaaaaacaagattaagtacaaataaaatccctaataaaatcgatataatgtgcataaataatagctcctttagcgaacacaatctcaggttttacttaagtttacatcatttttagctcgttattaagatggttaataatctaaagatatcacactttctttttaatcgaagcatttcatacctgaaatcatagaagctcttccatttctttgaaatacaaagtaaactaaaggtaacgaaagactaggaggagttcaaatgattggtaaaccaattcatttcgatggaagctctggcacctcttcaccccctactgaaaaaaagctgcctttcaaattaacagatgaagtgagaaaaaacctcagcggtaacccttatcagcaacccaaaagttaaatcaaacctggccttgcctaaagtgcgaggcttttgttattttcccagctaattaaccaatctccatcataagcaaaatagttgaatccgctctctacctcctttataatttgccttgaattaaaaataatttaattcaagataaattgcgcatcaagaaaggaatgaatgttgaaatggcaaaagtattatacatcacggcacatccacatgacgatacacaatcttacagcatggcagtaggaaaagcttttatcgacacttacaaagaagcgaatgagaacgatgaagtcgttcatctcgatctgtatcgtgagcatattcctcaaattgatgctgacgtttttagtggctggggtaaattacagtccggaaaaggtttcgaagaactatctgcaagtgaaaaagaaaaagtacagcgccttaatgaattaagtgaagaatttattgaggctgataaatatgtgttcgtaacaccactctggaatttctctttccctccagttatgaaagcttattttgactcagtgtccgtggctggtaaagcctttaaatatactgaaaacggacctgttggtcttttaaccgataaaaaagcaatccacatccaggctcgcggcggcatttattcagaaggtcctgcagcagaaatggaaatgggtcatcgctactttacaacgatgatgcaattctatggcgtaccaagctacgatggactttttgtagaaggtcataacgcaatgccagataaagcgaaagaaattaagcaaaatgctattgcgcgcgcaaaagataccgcacttacattctaatactattcatttaacaaaaaccagctgactagtcagctggtttttttatgagacaacgtatccctgattttccactattttttgtaaagctgatagagaaaccttgtttgaatcaaaggtaacatctgcatttccttctttataatgaatttcaacagccgatacaccacttaattctagtaaggcgctacgaatcactgctacacagtgatcaccagtcatcccgttaattttcaaggttacttgttccacttttttgtctccccctcacgaacttgttttgctattatccttcccgttcatcaaaatactatgacaaaacaagacagcttacattaaggagcggtcacagctaatttaaattgctgaatcattcttttgttttgctgcccaaagcacccaccaaattaataacggttgaaagagtaacctaatccatagcagcagctcatttgcttcctcctgtccaggagctggaattccagcaatcgcagcataaatgttggcaggaaaaataacgattaaatacaccgccgtccaaaaccttgcctgtttacgtgtataaggaatgaggagtaaaacggctaatacaatttccagaactcccgttacataaatcaagccaagcctaaacggcacccattcgggaatcatagctgcgaaaccttctccttgaacaaaatgagcgatccctgcaaaaataaagaaaagagcaaataacacaagcgcaattcgacgaattgtttttatcataaagaatctccttttcaattggattctttcatgatagcaaactctccttcttatttagaagaaaaacgatttaccgaagcagttgtttaattgtataaggaagcatttcatgcagcgtttcaaaggaatacgttagttcaagtcgttctgtccatttatgcgcatctcttcccatcggtcccaggttcataactggaacctttaactgttctaacgcctcgagaggtagcgtataagactgcccatataaaggcatgttgctcattaatggttgaatcgtttctttcgtacgctctaatccaacaaaacttaaatccgaaagtccaggaaaataatgttgcggctttaactttacgttatgcttctcgtcactgtaagtcatcacacgttggatcgtttcctgaataaatggatcatgacgagatgaaacggctgggtaaaacggcgggttataaaaaagaacgatcattggcccatcctctttacaaagcgctgcaagatcaaagaccattcttgttgaaagatctcgatccccaagatctttaaagttcgccgagatataatcctgacgacgcttaatttccgcttctccaaacaaagtaacagcccgttggagcaattgttcataggttaggacatttactttaaatggctctggaacatagctttgaagcatcgaaaaagcagttgctttttctaaatagtgatgttcaatacgcctggcagcagtttttacagccttcatcaatttatccgtaatttgttgaatgctactttccatcccaagcacattaaaaagcgtgacaccaacatgcggaatttgaaccgaatatccttcttttaaatccttttgcattaaatttgtaggcggaggcgttacttctccatcaacaacctcacaaaagtcagcatttagttctagctccttcgttacttctgccgccatgtaattcgcattcaatccagaaaatggttccccgacgtgcgtttcttgaccataacagaaaaaaccaggaagtaacttgccaattgatcctgaataaagatagagattttgatcaccgggataatttgtgaaaacaggctcagaatttaaacaagcagtatacgtaaggttatgttgttttgccatttcaacaagcacaggaacggcctcgatcatgccaagcgaattggcttcttcatcaggcaccgtaagaaataaaatattcccctcaaattccccaaaacttgctttttcaagcatgctcatctgtaaggcaatccctgctttcatatccatcacgcctcgaccaaatacccactccccattttccagatcattctgaacttctaatggcatcttatcgagattcttatatatttcttctgtcagatcatatgggctaaaggccaggtttttcaactggccataatcttctacatcgaccacatcgaaatgacttattaatataaccgtttttttcgctgttccgttcttgatcagacctgttacaaaagagcgtccatcacttgttgggtgaagagcaagcatttgaggattatctttaaaatagtctaaatcctgaagctgaagatgaatgtattctgcaagcgctacttcaggataggaacccgttacactctggtgttctacaagtcttgataacaaatacatgagcgtttcttttgtttgccatttctccacctcatcgccccctgtctgttttttgcaaaattcacctgtttttggtaggtttaatgagaatagacggcatttgatgacctcttcaccgtcccctacctaaaacatgtagcctttcaagttatgtgggtagggctcaacttcccctaaaggttcgaatggaagtttcactttatcatattttatacatacaaaacctgaaaagaccagtagaaaaggggaaaatcatgacaatcatatttgctcatagaggtgcaagcagacaatgtccagaaaatacattaagtgcttacgaacgtgcggtaaagcttggagctggaggaattgaaattgatgtccaactttcaaaagatggcgttccagttgtcattcacgaccgtaccttaaagcgtactacgtctgggaaagggattgtaaccgaatcgaattatgctgatcttaaaaagctggatgcagggagctggttttctccaaagtttcagcaagaaagtatcccttctttagaggaagtattgacctttgcttcagattatcccgaactctggctgaatattgaattaaaatattatcgagaagatgatgatcaactcgccaaaacagccattccgatgattaaaaaatttcgctctgataaaaatacgctgatttctagctttgaacacgaacgattgcttgaggtacataaattgtggtctaaggtagaaaccgctcctctttacaaggggaacttacatgaaccctggcactacgcaaaaaaactaaaagcaaaagcgatccaccctcacttcaaatccatccattcatcgcttatcaaaaccgttcaatctcatggtataaacgtgcggccttatacgattaatgatgagaaatggctgagacaatttcttgagtgggaagtagacggacttatgacggatgtgcctgatcttgcgttaaatatcatgcataacaagcaaatttcacaacaaaaaaagccctggtggaaaaacgtttggagcatgatcacaaagtaaagcacgatttgcgacttctttttttgcacatgctatacttagggccacgaaagaaggaataaaggagagattgcatgtcatcagcattatttacaccctataccataaaaaacgttacatttcctaaccgtattgtgatgagtcctatgtgcatgtattcatgtgaagcaatggacgggaaagcaaccaatttccattacacacactatacttctagggcagtaggacgaacgggtctcattattacggaagcagccgctgttaccgaacagggccgcatctctccacaggaccttgggatttggagtgatgaccacatagaaggattgcagaagattgtacaactttctcaagagcaaggagcaaaagtaggtattcaacttgctcatgccggtcgaaaagccgtattagatggcccgataattgctccatcagcaattccttttagtgataagatgaaaacccctcaagaaatgacgctagaacaaataaaagaaacgattgtttcctttaaagaaggcgcaagaagagcgaagaaagccggctttgatgttatcgaacttcacggcgcacacggttatttaatcaatgagtttctatctcccttaacgaacaaacgtgaagatgaatatggtggttcaacacaaaaccgctatcgttttcttaaagaaataatctcagaagtgaacgatgtttggaacggtccactctttgtacgtatttctgcagaagaataccacgaagaaggaaatacaatggaagatttcgtttatttttcaagtgaaatgaaaaaacaaggcgttgatctaattgattgtagtacaggcggagttgtaccagcgagcatcgatgcctttcctggatatcaagttaaacacgctgaaaaaattcgtaatgaagctaaaatctcaactggcgcagttgggttgattacacaccctcttcaagcagaggaaatcattcataacaaccgcgcagaccttgtcttgcttgcgagagaactattaagagacccttactgggcgagaaccgccgcagctgaacttggcgcagacttagaggcaccgaaacagtatgaacgtggttggaattaagtgaataaaccgagctcaaaatgagctcggttttgttataggtatatggactgtcatttgatcttctacgatatccgtatttacaaatacggctcttgcttcaccaactagatctacaatatctgcttcttggtaacgtgaactaatatgatttaacaggagtttctttacgtttgcagtttttgcaattcgagcagcttcctccgtagtggaatgataatactcatatgctaacgactccatatgagcggaaaatgtagcttcatggataagaagatcggcatttaaagcaaaatcaatggtcttctcattaaaccgagaatccccacaatacacaagatgtcttccttttatcggaggacctactacttcacctgcatgcaccactttcccattatctagggtaatggagtctccgttcttcaatttttgatagatcggaccgggttgtacacctaatgattttaatttttcaacatttaatgcacctgtcttatctgcttcttctattcgataagcaaaactatcaattccatgttctaacaaagctatctttattgtaaaactctgctcttgcacttgaaagtcgtcttctatttctacaattcggagtggatagcgtaggtgcgtaccgctaatttttacggccgtatcaataaaatgagcaagcccttttggtccgtatatcttcagttctgactctcccccttgaaaagaacgacttccaagaaggccaggcaacccaaaaatgtgatcaccgtgtaggtgagtgataaaaattttggtcagcctactaagtgtaatagtggaagaaagaatttgatgctgtgtggcctccccacaatcaaacaaccaaacttctccagaatcaagacgaagagctgtcgaactaacattgcgtttcgttgaaggaacaccagcgcctgttcctagaaatgtgaattccatttcaatcctccttatcatcacttctttatcgcaaacatctcgatgatcggctacactgtatgtatgcaattgagactggagctgatcatcatgcttgtaaaaaaacgattatatcttgcattatttctctcacatcttctattatttctatctttttatttatttagtgacttcttttggccactctttactgtttctcttcttctacttggagggatatcaattcgtcaagttaaatgggaaaagccgtctctatttcacctagtgatcggaatcttaagtggcgttttcctttatttcgctttctttttgggtaaaacattgatgcttgttcttttcccgcaattcatgacacaaattaacgaactttatacccttgtcgcaccaaataaagcctggcactttgttagccttattctcataataattccaggagaagaactgttttggagaggacttgtccaaacagagcttaaaacgagtcaaatcaaataccctattttactagcagcacttttctatatgagcgcacacctttatgctggagctttccttctacttatcgctgctgtgttagctggagttatgtggggctacttgtatgaccgaactcgtaatatggtcgttccgctgctttcacaccttgtatttgatttatttctccttgttttctttccgcttctgtaaggcatgccactttaattcctgaagcaggcttttcatatgctgcttatagacaagaacctcctcacgatcaggggtttctgtcccatatcgcactttctcgtaaatagctataatgtattctttatgttcaccatgaccagggatccttcggaaccattgatttaatgtctctcctgtttgacgtccaaccccatacttaagcgaccttatttctagatgaaagagctgctttcttatttgattcgaaggtggttttaattgtctcactttcttgtcttcccttgcattcaacatttcactcgttagagtagcaaaagagcttacatgaaggcgagaaagcacgagcctttttttataaatgatgagaaaaagaacgattaatgcaatgataagacaagtatagaaaataagctccactggcaagtctatactttgtccattaatcttttgttccttgattatttgttggttttccattgaagataacccttctaagagaagagaatcttcttcagagcgcgtcggaagatttgaggttagccagtagatcggtaaaccaatgacataaccaattccacttatcgtataagaaatcaccttaataagagggtctttcatccagataatcatactaatcaaaccgcttgaaacggctagcaaaaaaaagatcgaactcattgcccatctagcctgtctcggtccccctgtttttcttacctgtactgccgctctacatatgaggagcaaaagaaattgcacaagaggaaatagaaaaacgacctgtcttaactctgaagaattactgaaaaggaagaacagaaaggaagcaaccaaactcaagaaaaaaacaattgtatcatcgtgacgagttaactctctaatgttgacgtagctacgccatgcgattgtaatcgaaagtagaatggaataaaaaagcggtacacctaacacgattccaacaacggcggttaggatgccaagcagaaatatccgcgaaaaggtgacttggtcacgatttctaaaataaagaagaaaatagcaactgccacagccaagaacaagcacaagaaaagggaaaataggcgggaatgtttgttcatataaataaaagaacgctaaaaggaaatacacgaaaaccatatcataaatataatagagaagatgaggaagttctcttagtactttcattaattccgaaccctttctatcttattaagatacgcataaccatccgacattttcacgttatagcacatatgacctatactcttcaaaagctgataaaatgtttcttcatcctttgattgaatcggctcacctaatcgaatcaaaacagagcgctctgataatcgcttttggagcaatgaactcatccgttcaaaagataaaagcggtcttgtgtcatcaattcgagccagtaactctagcgccttacttaaatgagcattcccctcgcccacttcaagtaccatagaagaagcaggtccttcaggatcaagattaatatggatttcaaacgctacccctcgtttcgtagcgactgaacaaagaaaggccaggtggctaatatatgcttcgatgttattggagacttgcccgggactattctttcttttaacagataaatcaagaacaaatacccacctcatctcgattgaacgctcgtacactttcgttttcaattctgaagttcttgccgtagctttccaatgaatacgattaaatggatcagagttcgcgtactgacgggcaccggctggagcagacaggttttcatagagcgaatgttcataagcgtgactccccatttcataggtcgaaagttgttctacgccttgcacctcactcaactcagggtaaatcaatacttctgtttgagagaagccttgaagactagatagacggctccctaaaccaaagagatcatttattttaaattgaaggttccttatccgcgtagctcctctttcataagcatgaatggaaaaggaaatgttcttacgttcatttcgtctcataaaaaaaggaacataataatagtgaaggtttttcgtgttttgaacaatttcaagttgagagagatgaatcacaggctcaacagcaaagcgcaactcgccgttccaaatcggcaactttccttgattttgtatcgaaaaggagagcgtttcatgttcacctttgaaaagcctaatcgtatgtcgcttattttctacctgaacagatgtagctgctttctttaagtagatacgggttccataggtaagtagcattaatgcaatggtaatcatgaatagctcgaccgattggaaataaaacgccacaataactaaaacccagctgagtcccaaaaaagaagaaaggaataaagagagtgtggttcgcgactcccacctcatgttgttgcccctcccctcacttccaccggaacctcgacttgagtaagaatctcttcaagaacagcttgtttcgttttacgcatcgctccttccatcgttaaaactagacgatgactgagaacataaggggccacgaactgaatatcttccggagttacaaatgctcttccttcgatgaatgcttttccttgtgctgctttcataaaggcaatggttcctcgcgggcttacgccaacacttatgtactctccgcttctcgttgcttgtacgatacttaaaagataatcttcaatcacctcagaaagttccactcgtttcacttctttttgaaacaattcgatttctccatctttaaaaatcgactttaaatcatcgaaaggattttgatgtcttaccatttgaatcattcgtttttcttctttcggtgttggatatccgctttgcatctgcataaagaaacgatccatttgggcttcaggtaatgaaaaagttccttgtgactcgaggggattttgcgttgccattacgataaaaggcgtcggaagtttgagcgttgttccttcaatggttacctgcttttcttccattacttctagtaaactcgactgcgttctaggcgttgctcggttgatttcatcagcaagcaatacgttcgtcaccactggtcctggacgcaattcaaaatcttgcttttttggattgaaaaattgaatacctgtcacatcaccgggtaaaacatctggagtgaactgaattcttttaaattgcccacctagtaaaacagccattgatttagctagaagggtttttccagtaccaggaacatcttcaagtaacacatttccattatttaataaagaaatcatcaccagctcaatcgttttttcctttccgatgagaactttttgcatctcatgttggacaagtttcatcttttcaacaatagtcatattagcagcccctttttagatggagagatatcgattactccttatcttgcttatacttccagaggaagtcacgatctaaacttgtgccacgccttttctcatctcttaacttatgacttccatccttaccaagttgatttcctttaagaagagctccttccccatatttagatcgaatcgtcccaatcgtattctggagattatgtcgttttgaatccgcttcaaaagaaaataaatcaagctgaacggttgcctcggttcgatcaactagctgctgtcctgttacgccaagtaagcgaatcggctgccctgaccaattcttttcaaaaagagattgagcagcttcaagaatgtctgcagactgagatatgggattttgaagttttctacttcttgtcacggtggttcgatcactgtaacgtatcgttagctgaatattaaaacttagaacgttctttttggccatccgcttagctacggaatcagataaatttgtgagtgcggtatgaatgcggtgatgatcaataagatcttccggaaacgtagtggaattgccaacacttttaaattcatctatcgcatctggatcaacagggcggttgtctcgtccgttggcacgttcatgtaaccttcttccattaatgcctagcttcatttcaagttggagaggattcgcatgagctagatcgtggatggttttaatttctagctcaagtaatttttcttttgtcttctttcctaccccgtgcatttccccaacatcaagtggccagagcaattgatctaactctcgtttacgaagaattgtaatccctaaaggctttttcatatcagaagccatctttgctaaaaatttattgggagcaattccaatactacaagggatgccaatttcagcatgaatgcgattttgaatttcctccgctatttcaataggatttcgatctccacaatcttctgttatatctaaatacccttcatcaatggagactggctggacgagcggcgtgtaggtttctaatagttcaaaaatttggagagaggtttgtcggtaaagtggaaaattaggcggcataatgagaagttcaggacagtgctttttggcttcccaaaccggcattgtcgtcttgacgcctttctttctcgcttcatagctactcgttacaacaatacctcgcctttcctctacattcccagcaatagcaagaggttttcctcgaagttttggattatgagcgacttcgacagacgcgtaaaaactgttcatatccacatgaaaaataattcttcctcttccctttgtactaaggttcattccacacatctccttaagccctatatcgaaaccgttcgcgtttcccgccactcatgctaaaaagacaggagaggtctcctgtctcacgtggtgggtacttgctttcgttctacccatttcacaaattcactaccgtgaaaatgctgattgaactccatttgaaattcgtacatagcatctagaaattcagcattttcagctgattttgagcgatactcatctaagtaattcatgaccgcataggaatactgcgtactagcttccactttattatgaccttcttccgtcaaggtcacgtatgatacgcgccggtcgttcgctttcttatcaagtttaacaaacagtttgtttttcaaacgttttaacacctgcataactgttgatacgtcccaaagaccaatttctgaaactcttgtaatagtaacttcttcttccaaataaacaatccacatcacatgctgttcggcttgagttaatccaatttctctcgcatttttttgccattcattttccagtactttataagttcctcgcatataattcataagtttatgagtttgaatagagtccattttaacaccgcttccacttcaataattataatcataccgttctattttaacataatatagaagcagtgccacaaaggtggatgtaacaaaaaagagaacattgccgaaaatcgacaatgttctaaacaatgcttctacgcattagcaacttctttaataattgagataactacttcagatacctttactaactcttttactggcatcctttcattcgttgtatgaatttcttcataaccaactgcaagattgactgtagggataccatgcccagcaatcacattggcatcacttccaccaccacttgttaatagttctgggcgacgtccaatcttttccatcgcttttttggctacttcaacaacatagtcgccttcattaaacttaaagccagggtacataactttaatatcaagttctacagatccgcccatttcagaagccgtcttttcaaatgcctgcttcattttctcgacttgcgcttccatcttctctggaactagagaccgcgcttcagctagtacttctacgtgatcacaaacaatgtttgtttgggaaccaccttcaaaacgaccgatattcgctgttgtttcatcgtcaagtcgaccaagcggcattttcgcgattgattttgctgccattgtgatggctgaaacgcctttttctggtgcaacaccagcatgagctgttttcccataaatggttgcttttattttcgcttgcgtaggagcagcggtaatgatttttccgacttcaccatcactatcaagcgcataaccaaatttggcgattagcttctctgggtcaagaacttttgcaccttgaagccctgattcttctccaaccgtaataataaactgaattgttccatgctcaatattttgttcttttaatacgcgaatggcttcaaacatagccgctaagcctgttttatcatcggctccaaggatcgttgttccatcggttactacatacccatctttgatggatggcttaacgcctttacctggtactactgtatccatatgagaagtaaagtaaattggatctgctttttcaacggtccctttaagcgtgcaaattaggttacctgcctcatgatctgtcttttctgcagcgtcatcttcttctacttcgacaccaagcgaagtgaatttctcctttaaaatggcagcaattttcttctcgtgtttcgtttcagaatcgatttgaaccagctctaaaaattcgtctactagtctttgttcattaatcatgttgtttctgcctcctagaaatcggtttaaagcgggatattgccgtgtttcttcttagggcgttcttcgtgcttattccgcatcaattcgagcgcttcaatcagtttctttctcgtctctcttgggtcgataacgtcatcaaccatcccacgtgaagcagctatgtatgggttcgcgaacttctcacgatattcttcaatctttgcagctcgcgttgcttctggatcttcactctcattaatttctctcgcaaaaatcacatttgctgcaccttccggacccattacggcaatttcagcatttggccatgcataaacgagatcggctccaatggatttggaatttaaagcgacataagcgccaccatatgctttccttaggataaccgttatttttggtacggttgcttctgaataggaataaagaattttagctccatgacggataatacctccatgctcctgtttgatgcccgggaaaaatcccgttacatcttcaaacgtaatcaatggaatattaaaagagtcacagaacctaataaagcgtgaaagcttgtcagatgaatcaatatcgagtccaccagccattactttcggctgattgcaaaccattcctactgtctcaccttttattcttgcaaaacctatcacaatgtttttcgcaaaatatttttgcacctcaagaaaagagtctttatccacaacagaatcaatcaccgctctaacgtcgtagggcctcgtcgcgtcaaatggaacgatgtcagcaagatctgcacagaaatcgtcacgttcttcacttttaatgatgggactcttttcttcattatttgatggtaaataactaatcaaatcacgaacgcttgcgagaacctcttcttctgttttacctgtaaaatgggcattaccacttttagaacgatggactttcgcaccaccaaggtcttctgctgtaatcttttcacgtgtcactgtttcaatgacttttggtccagttataaacatctgactcgtatcttctaccataaaaacaaaatctgtaatcgcaggagaataaacagcaccacctgcgcatggccccataatcaccgaaatttgtggaatcacaccagaatagatggagtttcgataaaagatgtgtccatacccatccaatgataccacaccttcttgaatcctcgcacctccagagtcgttcaaaccgataattggcgcaccattacgcgctgcaagatccataacgtgtgctacttttttggcatgcatttcacctagcgctccgccaaaaacggtaaaatcttgcgcaaatagataaataggacgaccattcacctttccataaccggtgaccacaccttcacccggcgcttttacatctcccattccaaaatcttgagatcgatgttcaatgaacgaattaagttcaacaaaagtaccctggtcaacgagtaaatcaattcgttctcgagccgttaactttcctttctcatgctgtttgttaattcgttcatccccacctccaagctctacttctctccgtcgatcgtacaattcgttgattttatcatacatatccattattctgcctccttcgaaggtttatcacaaagttcgtacaggacccctcctgctgatttaggatgcagaaatgcaatattcgctccaccagcacctttaacaggcgtttcatgaataagtttcactccgttttcagaaagttcacgtagcctgtcttctattcgatcgtctgcaagtgcgatgtgatgaattccttcgcctcttttattaataaatgaagcaattggacttgattctccaataggctctagaagctctattctagactcaccgattttcataaaagccactttcaccccttctgaaacaacttcttcgattgcctctagtttcaaatgaagttggttcacataaaaagggagtgcctcttctagagaagatacagcaattccgatgtggtcaatttttttaggaggttctttaatggattgatcgattccgtctcgctcatacactgctttttcgataaaaacagcagtatctttagttggcgtacctggcgtaaataccttttgaattccttttgattctaaaaacgggatgtcttcccaaggaataactccgcctcccacaacgataatatctcccgcatcgcgctgttctagcagtgaaacaatttcagggaatagttcattatgtgcacctgataagcatgataagccaatcgcatccacatcttcttgtattgcagctgtgacgatttgttgtggcgtttgccttaaacctgtatagattacttccattccataatcacgaagcgcctgagcaattacaagagcgcctctatcatgaccatcaagacctggcttagcaattaaaacgcgtatcttcttcatctctttccactccccgtttgtttagattccagtgtattcgccaaattcttcacggagtatgccgcatatttcaccgactgtacaataatctcgaacacaattaataataagcggcattaagttacttgtgcctttagctcccgaccttaattcctccaaccgagcgctcactcgatgttgatctcttgtagtccttaaagtttcaagcttttcaatttgtttccgttgaagctctggatcaatacgatgtaattctggtttaggttcgtcttctaacttgtattgattcatgcccacgacgacttcttcaccactctcgattttcttttgcgtttcatacgcagcctggtgaatttcgcgctgcatgtagccctgttcaacagcggatactgctccgcccatatcatcgatcttacgaatataatcaaaaacatacgtttcaagctgatcggtcaaattctctataaaataagagccgccaaggggatcaaccgtatctgttactccgctttcgtttgcaataatttgctgggttctaagagcaatccttgcagagtcttccgttggtaacgctaacgcttcatctttcgcattcgtatgcagactctgtgttcctccaagaacagccgcaagtgcctgaatggtaacccggacaatattgttgtccggctgttgtgctgttaacgttgacccagctacttgagtgtgaaaacggagctgcagacttttcggcttttttgcaccgtagcgttctttcataattttagcccagattcttcgcgctgccctaaatttcgcaacttcttcaagaaactgattgtgcccattaaaaaagaaagcaagccttggcgcaaaatcgtcgacttttaaccccgtttcaattgctgcatcgacataagcaatgccattcgcaatggtaaacgctagttcctgagcagccgtcgaacccgcttctcgaatgtggtagccagatatactaatcgtattccatcgcggtacatactctgcgcaataggcaaaaatgtctgtaatcaatcgcatagatggttttggaggaaaaatataagttccccttgctatatattcctttaagatgtcattttggatcgttccggaaatttgttcttgtgatactccctgtttttctgccacgacgatatacatcgcaagtaataccgatgccggcgcattaatcgtcatggacgtactcactttatcaagagggatatctcgtaaaagcgcttccatatcatcgagtgaatcaatcgctacgcctacctttccaacttctccttttgccatcatatcgtccgaatcatatccaatttgtgttggaaggtcgaaggcaacggataagccagtttgaccttgatcaagtaaatagcgaaagcgacgattggtttcctcagctgaaccaaaccccgcatattgtctcattgtccatgttctaccacggtacatggttggttggatcccgcgtgtgtatggatattgccctggtaaacccagtttctccatgtaatgtagatctaagtgagtcggatgtccaagacggtctatgtcaattccagagctcgtcttaaacgcttcttttttctccggaaatttctcgattaatttttcagtaagtgatttccattcctcgaattgactttgaaaatctttcttttctgtcgccatccccattcctccctggttgtcttcctctaattgaatagatttgaaatttagatgtctaacttatatctaattctggataaagtaagcgttttcctttaaaattcgtaaaatttgtcgaagcactttctagtttaatcgaggatagtcttgtccaacccaacaaatcattgtaaaataacgatagaatgcttattttgggagggactctcatgcctcgtaaagctacaaagatcgtcgtttatattatgattatttcgatgcttcttagtttatttgctggagcaacagcgatgttgttttaatgacaatacgttttcaactagctatttcacaaatataggtaacaaagtatagaaaagaagaagctatcattgacagcttcttcttttctatactcactttagatcgatattttctgctattgcttcagcttgccttgccagttcataaaaagaatgatcgcttgaggtaattagaattttagttccaattggtatgtcattaaaaagcagttcaacttcctcatttaaaagtcggatacatccagcagttgtatatttcccaatagaatctggacgatttgttccatggacaccgtaaattcggccatttgttccttttgcatcaaaaccaatccaccttgtaccaagcggattctctttaactccaccctcaatatttttcttcctgtaataaggattttccgctttcacaattattgtaaatagcccttcaggagtctgatctacacttttaccagtcgctaccgataaaacacgctgaacttcattcccatcaatataggctaattcattcaccttcttatttacaataagaaatggatcacccggatttgggtgagtaccgaatggaaagagaatggataccgataaatacagtgataacatgatagagaacaaaatgtatcactccttttactctctatcatgcatccatttataggattcattcagcttttgaaaaagctcctggtttaaagtaacgctttagtaacaagtattgttcgacttcatttagaaagtatagaagggctgaacgcgtttcaaactcttcacgatctgcaggcagtggagaattccgaaattcctcgcgcatcgtttctagttcttcaagaaacacatttgctgtattttgtggttttacagagcaactgagcttttccatgaaatcagccattgtgcgaccgtgcagataggtttgatcaagtgaagaaataataggcaacacgcgctctaagatggcaaattgcttttcgcgcattttaaaataaacataatacttatcatcatcgcgtaacatgtggttttcaatatctttgagcgcaagattcttagcatactgaagtaaatccccaacttcaatgatctctttcccatcccagttactttcaccttcacgaagataaacagcatactccattaaaattattgaaaatttttcttcgatttgttttctgattttcatcaaatctttttcaagatttggcatatacaaattaaagagaagtgcaacaccaattcctatgacaataatcgctacctcgttccatacaattccccaacttacatgattaaaattataaatatgaagaatgataacggaacttgtaataacgccttccgttgcttttatcgcaacaaccactggtataaagaagagtagcaatagcgaaatgctaaacggtgtataaccaattccttcaaaaaataccgcgctaaatacaataccaagtaaacatgccagaaaccgttcccaagaacttcgaaatgatcgtttagttgtcggtttaatacaaagaattgttaaaatgccggcagaaacatagttatcaagtgagaaaagttgcgcaattgtgatggcaacccctgttcctattgctgtttttaacgttcgataaccaattttcactttcaataaagatacttccttccacaatcagagttacttctttaatatccttcaattatcagagtctaaaccattttctcttgattgaacagttaatttcgtttatatagcgctttcatgattttttttttacaaaatgatgtttaggaatactgttgtactaaaataaacactaaaaaaagtgaacacgaatgtccactttacaacaccttatctaaaaatacttttgctctatctgttttagggttattaaagaatgcggaaggttcactttcctcgactaactttcctccatctaaaaacaaaattcgatcagctgcttctcttgcaaacgccatttcatgggtaacgatgaccatcgtcattcccgacttgccaagatctttcatgacatctagtacttctttaaccatctctgggtcaagtgcagaagtaggttcatcaaacaacatatattcaggctccattgctagtgccctagcaatcgcaacacgctgtttttgtccaccagacaagcgctttggatactcattcgccttcatcgaaagacctacttgtaaaaggagctcgtgagctttttcctcagcaacatctcgctttattcccttcactttcattggtgcgtagataaggttttctagaacggttttatgtggaaaaaggtgaaaatgttgaaagaccatccctattgactggcgtaattccatgatatttgtagatgagtccgttagtttcttatcatccacccatattgcaccagaacttacttgttctagttgatttaaacaccgaagaagagtcgacttaccagatccagatggtcctataatcgcaaccacttcacctttcttaatcgatgtattaataccgcttaatacttcaatgttaccgaaatttttgtgaagattttctactttaatcactgcgactcattctcctttctactatttttcctaccagcgttaaaatcataacaagcaaatagtaaataatccctgcaattagtaagggttcaaagtatttgaatttctcagcagccacgatctgacttcgtctcataatatcaaaaacaccaataacagaaacaatcgcagattcttttgttaatgtaataaactcattcataagggcaggtaaaatgtttttcatagcctggggcaggataatatccttcatcattggacgataaggaatacccagggcggcagcagcttcattttgtccagtgtctacggcacgaattcctgctcgtattatctcagatatataggcggcagaattgagaccaaatgagagaacaccagcttcaaaggctgaaatatcataacctgttaactgaggtgttgcatgataaaataataatagctgtaagataagaggggtacctctgaaaacagatgtataagcatcagctagccaactaagcatctttactcgcccgatcttaaataatgcaagtatcgtacccaatgcaaatcctactatagctgaaacactaacaaactttaacgtgaccaatattccttgcaggatgtagggaatattaggcacgaattgaccgaaatccaaattcatgcctgttcatcctttcttctatgatgttattctacggtgtcctgtccaaaccatttctcaataagctcgtccatcttgccattttccttcatttccttaattacttcgttaaattctttcgttagctcactatctttcgggaaagcgacagctgaccccgcctcttctgtattaggaagattctcaccagttagatcgtcattactctctaagtagccttttgctacagtgtcttcaataatgattgcatcataacgtcctgatttaagttcttgaatcagttctggaatacgatttaacgtgatgatttccatatcgattccactttcatttaattctttggctttgtcttcttgaattgaaccgagttgaacccctaattttgctccatcgagatcttcaggttttaccatttcattatctgttgaagaaacgatcatatggttagctgaataataaatatctgagaagtcaacgttctccttacgctcatctgtaggagtcattcctgcaagaacaaaatcgacgcgctcactacttaatgcagtaattagtccgctaaaatccatatccttgatctcaacgttatagcctaactcatcagcgatgtaatttgcgatatctacatcaaatccaataatctcttctccttgcgcagaatcaatatattcaaacggcggatagtcagcagaagtgcccattacgagggttttttctgaattccctttatcatcttgatttgcatcttcatttgaagacccgcatgcaacaagtcccattaacataaataatcctactatcacgattaaccaatttttcttcattttaattccccctgttaaatgtataataattcgttaacttgaatatttattactatatcagatttcttttttacattccacatatttattcatatatttttatataaattaaagttcctttattctgtatattctgttattcaaacaaagatatactccttcagctcgttttcgattttataggaaacgaataaatgatgcataaaaaaagcaccaggcaatttgcctggtgctcactgaaaagcgattaacaatatttattaaataaatattgtaacattccggaaacttcttcaggatcgcttccttcgatttcatgacgttctaccatgttaatgatttctccgtcttttagaatagcaaacgaaggagaagatggcgcaaaccctgtaaaataagatcgcgcttttgctgttgcttctttatcctgaccggcaaaaaccgttacaagattatctggtgttttctcgttattgatcgccattcttgcagcaggacgtgcaacgcctcctgcacaaccacatactgagttgaccatcacaagcgtcgttcctttacttgtcacaacctcttctacctcttcaggtgttgttaattctttatatcctgctgctttgatctcctcacgagctgtcgcgacaacatcattcataaatagattaaagtccattgacatgctagattcctcccttaattcaaatcaccttctttcttattgtatcgcgaatcacttcacttttccaagaaacgctttcattctatcaaaaaaaacagccatccccagatgagatggctgtacattttagtaaacagatgtgttttcttttgagattgtttctaggttttctttcactcgagcaagaaacttaccgcaaatcattccatcaagtactctgtgatcaagagagaggcaaagatttaccatatcacggacagcaatcataccattattcataacaactggtcgtttcacaatgctttctacttgaagaattgcagcttgaggataattaataatgcccatagattgaacagagccaaatgagccagtattatttactgtaaacgttccaccctgcatttcttcaccttttagcttacctgtttttgctttttgggcaagctctttcacttcacgagcaatccctttaattgatttctcatctgcgttcttaataaccggaacgaaaagagattcatctgttcctaccgcaatcgaaatattaatatcttttttctgaacgatcttatctccagcccacatcgaattcatttgagggaattctttaagtgcttcgacgacagctttaacaaagaaggcaaagaacgttaaaccatacccttctttctttttgaaatcatcttttatcccattgcgatattctacaagatttgttacatccacttccaccattgtccatgcatgtggagcttcatgcttgctgcgaagcatattgtttgcaatggcgcgacgaacacctgtaacaggaatctcaatatcgccttctcctactggaacttccgcactttttgattccggtactgatttggtaggagacttaggtgcctctttcttctcttcttttttctcagaaacttcttgttcttgcttcggtgctggaatttctcctgaatcaatcaccttttggatatctttacgagtaatccgtccacctttaccagaaccactaatttgttcaagatcaatattattttcttgtgacatacgaagaactgccggggagtatcgacgtttcatcggttgattctcatcctgctctttcttttcttctgatatgttttcaatcgcctgttgacctgttgattcttcctgcttttcttcttttgcagctccaccttcaacatcgatataacatacaagctcaccgacttcaattgtatcgccttctccagcgactagttctttaataactcctgaataagatgaaggtacttccgcattcactttatctgtatttacctctgcaattggatcatatttgtttacagtatcaccgacttcaacgagccatttttcaatcgttccttctgtgacactttctccaagttgaggcatcagtattttttcaactgccacaataaaccctccacttcttactatctcttagtattctgctagttcgcgcattgctttttctactttgtcaggattcagcataaagtacttctccattggtggtgagtacggcatagctggtacatctggtcctgctaagcgcttaatcggcgcatcaagatcaaaaagacattcttctgcaataatggcagaaacttcgccaataatacttccttctttgttgtcttccgtaacaaggagaactttacctgtctttttcgcagcttccacaattgactcacggtccaatgggtaaactgtacgaagatcaagaacatgtgcagaaataccgtctttttcaagcttctctgctgcttgaagagcaaagtgcacgcttagaccgtatgtaatcactgtaatatcgtcaccttcacgttttacatcagcttttccaattggaagcgtatactcttcttcagggacctggcctttgatcaaccgataagcacgcttatgctcaaagaaaagaaccggatcgttatcacgaatcgcagcttttaacagcccttttgcatcataaggggtagaaggcataacaattttaagtccagggacgttagcaaaaagcgcttcgacagattgtgagtgataaagtgcaccgtgaacgccaccaccataaggggcacgtattgtaataggacaattccaatcattatttgatcgataacgaattttcgctgcttcagatacaatttggttaacagcaggcataataaaatctgcaaactgcatttctgcaacaggtctcattccgtacatggcagcaccaattccgacaccggcaattgctgattctgcaagtggtgtatcaatcacacggtgttcaccaaactcgtcataaagaccgtccgttgcacggaaaacacctccacgtacaccaacatcctcgcctagaacaaaaactttctcgtcgcgctgcatttcttctcttaaagcctgggttatcgcttgaatatatgaaataactggcataatggttcctccttactcttcgtatacatacttcattgcatcttcagccggtgcataatctgcattttctgcgtactctgttgcttcatctacctctttttgaacacgctcatgaatttctttttcaatttcatcggtcaggacgcctacttcttttaaataagctgcaaacgtaataacagcatcctttttcttcgcttcttctacttcttcacgcgtacgataagcgcgatcgtcgtcatcacttgagtgaggtgttaaacgataagatacggtctcaatcaatgttggaccatcacctcggcgccctctttctaccgcttctttcgcagcttcataaacagcaagtggatcatttccatcaaccgttacgccaggcattccatacccaatggcacgatcagacactttctcacaagctaactgctttgatactggtactgaaatcgcgtatttgttgttttcacaaacgaatagcactggtaacttatgaacgccagcaaagttagccgcctcatgaaaatctccctgattggatgaaccttctccaaacgaacagaacgttacaaggtcttttccttccatgcgacccgctagagcaaaaccaactgcatgaggcacctgagttgttacaggtgaagagccagtgatgatgttgttcttcttctgaccaaagtgacccggcatttgacgacctgctgagtttggatcttctgctttagcgaaacctgagagcatcagatcttttgctgtcatgccaaaagaaaggactacgcccatatcacggtaatacggtgcaacaaaatctttctctggatccatcgcaaatgcagatccaacctgagccgcttcttgtccctgacaggaaataacgaacgggattttaccagcgcgattaagtaaccacatgcgctcatcgattttacgagccattaacattgtttcaaacatttcaagcactctttcatctgaaagtcctaatgcttcatgacgattttcagccataatgttttacctccttaaataaaccttttattaagaatgaattgctttcccatccactgcaagtgcagcttcaccaattgcttcagacagtgtagggtgaggatgaatggtatgcgccacttcccaagaggccgcatcaagaactttcgctagacccgcttcagaaatcatatcggttacatgagggccgatcatatgtactcctaaaagatcctcattgtccgcatcagctacaattttcacaaatccatcagattctccgaaaacaagtgcttttcctattgctttaaaagggaactttccaatcttaacgttatgaccttgctctttcgcctgcgcttctgttaaccctacacttgccatttctggactgctgtaaatacagcttggaacctgagtgtaatcgattgggtcaggatcttgatcagctaagtgttctactgcagtaatcccttcatgtgaagcaacgtgagcaagctgcataccaccaatcacatcaccaatcgcgtatatatgagattcttttgtttggaaatattcattggtttgaataacgcctttatctacttcaattgtcgtgttctcaagaccgatgtttttcacgtttgcttcccgtcctactgacacgagcatcttatctgcagaaaacgttttcgtttctccttcatgttccgcttgaatggatacaccctgatcctttgttaacgactcgcccattacttttgcgccagtgaaaagcttgatcccctttttcttcatcaatttatgtgcttctttagagatatctttgtcttcagtaggcacaatacgatcagcatattcgaggacagtcacctctacaccaaaatcaacaagcatggaggcccactcaattccaataacgccaccaccgacaatgataatggaagatgggaggctttccatatgaagagcttcatcagatgtcataacatactcgccatctacctcaagaccaggaagcgtccgtggcttcgagcccgttgcaataataacgtttttaggaatcaacatttcattttcttccccgttattcatttcaactgaaaccgtaccaggcatcggagagaatatggatggcccaagaatgcgaccgaatccttcaaatacatctattttcccttgtttcataaggtgcttcacgccattatgaagctgatcaacaattccctgtttacgttcttgaacctttttaaaatctaacgcaatttcctttgccatcacgccaaatttctcaccatgcttagcagtggcatatacttcagcacttcgaagtaacgctttacttggaatacagccgcgatgcaaacaagtaccaccaagttcacgcttttcaacgattgccgtttttagacctagttgggaagcacgaatagcagctacatagcccccagtacctccacccattataacgagatcatattcttcagccattcaaattctcctttataaaacgttttattccacttttttatttaaagagtcactgcacatgaatttgaaaatgcgttagaacctttaaaccattgattctacagaagaaacaggataaattttcgctatttcctcttctcttaacacgcgtaatccaccttctgcgagtgcctgtagctcattctcaccaggatgaacgagaacatcagcaatccacttgatttgctctgttatttgagagacaaattgttttccataagctagaccaccagttaaaacgatcgcatccacttctccagcaagaacagcactagccgctccaatctctttggctacctgatacgccatggcatcgaaaataagttttgctttctcatctccagcgtgaattcgctgctcaacttttacggcatcgttagtgccgaggtacccaacgtaacctgcttgtccaacaagctttttcatgatttcgtcagcgtaatactctcctgaaaaacacatggcgacaagatcaccaacaggaactgttcccgcacgttctggtgaaaatggaccttcaccgtgtaagccattatttacatccacaactttcccttttcgatgggcaccaacagtaatcccgccccccatgtgagtcacgataaggttgagatcttcgtatttgctatttaattgagaagcaactcgtctggcgactgctttttggtttaatgcatgaaaaatacttttacgttcgatttctggcactccagaaaggcgagctacatcttgaagttcatcgacaactactgggtcaacaataaaagatgggatattgagctgttcagcaatttcaaaagcaataatcccacctaaattcgaagcatgttcacccgaataaccattacgaagatcttcaagcatgcgttcattaactgagtacgttccaccttcgataggacgcaacaaaccaccgcgtcctacaactgcagataatctcgaaatattaatatcttcttcatctaacgcttcaagaatggtgtttttcctaaattcatattgatcgatgattgttttaaattgattgatttcatctgtatcgtgccgtaatgatttctcaaatacagcacgatcattatcaaatacgcctattttcgttgaggttgatcccgggttgattaccagaagtctatatactttatctgtcactccaaaccctccgtttatctacgatgacctagaatatgctgagagttcactaagaattgacttcttgactgcttcatttgctcaattctttcttcagctagacggtctgccgctgcataagtaggaatgccatcgcgtttagaaatttcgataacttttgcaatggtgtcataaatgccatcaacgcgcttcattgcacgatcgcgattatatccataaagttcatctgcaacgttaataacaccaccagcattgataacatagtcaggcgcataaacaatacccatctcatgaatctgatcaccgtgtgtcgtttcgcgaagctggttgtttgctgctcctgcaataacttttgctttaattttgccaattgtatcgtcattgataattgcaccgagtgcacatggtgcaaaaatatcacagtctacctcgtaaatgtcgtctggatccacagcttttgcaccaaagtcagctatcgcacgatcaaccgattctttgttgatatctgtaacaactagagaagctccttcttcatgaaggtgtttgcaaagattataggcaacatttcctaccccttgaacagctactgttttaccttgtaaagaatctgtaccaaacgcttcttttgctgcagccttcattcctacataaacaccataagctgtaacaggagaagggttaccagaagaaccaaacgctggtgaaataccagttacatattctgtttcttcatgaattgtatccatatcttgaacagtagtacccacgtcttcagcagtaatgtaacgaccgtttaatccctgaatatatcgtccaaaagcacggaacatcgcttcatttttatctttacgaggatcaccgatgataactgtttttcctccaccgagatttaaacctgctgcagcattcttgtacgtcattcctttggctaaacgaagagcatcctcaaatgcagcttcttcagaagcgtatgtccacattcttgttccaccgagagcgggtcctagggttgtatcatgaatcgcaataatcgcttttaatcctgaagctttatcttgacaaacaaccacttgttcgtaatcgtatttctccatataagtaaaaagttccatcagtaatctccctctctgttatcctctaatttttatttagctgaacttactgcaagcgcgatactataaactttgctttctgaactatctgcgcgagaagttaaaacgattggcgctttagcgccagcgatgactcctccaacttttgcatttgcaaaatagacaagtgatttatacaatgcatttcctacttctattgaaggaacaagaaggatgtctgctttcccagccacttcactttggattcccttatgctctgctgcttctattgaaatagcgttatccaatgcgagtggtccatcaatcacgcattcagaaatctgccctcttttattcatctgagttagcgccgatgcatcaagcgtcgcttgcatagctggattaacgacttctactgcagctagcggaacaactttagggagcgcaattccaatacttctcgcaatcgatacggcgttattaacaatttccaccttttgcgttaaatccggctcaatattcataccagagtctgttacaaaaagcagtcgttcatatcctcgaacatcaaaagcggctacgtgcgaaagaacttttccttttcgcaaaccatattctttatttaatacttcttttaaaatgactgaagtggaaaccattcccttcattaaaacatcagcatcttcatttcgaacggcttgaacagccatccttgaagcttcttgatctgactccacatgcacaatttgaagagatgatgattcagttaaaccttcatcagttaacatttgcttgatatcttgcttatcaccgtaaaggatgaatgaagccagttgtttctgaatagctttatgaaccgcttcaatcacttctttatctgcagcagcagcaagtgcaatcgttttgttaggttgtttggatacttccatcacaagttgatctagattcattgatgtcctccttctacgccatcatactattatgcaagttccgtgccaattcta

(The sequence listing continues in the following parts.)
